United States Patent Application Publication US 2026/0297552 A1, published October 1, 2026 (application 19/126,929).

The application's sequence listing, which the Patent Office published only in electronic form, follows.

SEQUENCE LISTING (730 sequences)

SEQ ID NO: 1 - protein, 1071 aa, Bacillus sp.
  REGION 1..1071: note = APG07433.1
MRELDYRIGLDIGTNSIGWGVIELSWNKDRERYEKVRIVDQGVRMFDRAEMPKTGASLAEPRRIARSSRRRLNRKSQRKKNIRNLLVQHGVITQEELDSLYPLSKKSMDIWGIRLDGLDRLLNHFEWARLLIHLAQRRGFKSNRKSELKDTETGKVLSSIQLNEKRLSLYRTVGEMWMKDPDFSKYDRKRNSPNEYVFSVSRAELEKEIVTLFAAQRRFQSPYASKDLQETYLQIWTHQLPFASGNAILNKVGYCSLLKGKERRIPKATYTFQYFSALDQVNRTRLGPDFQPFTKEQREIILNNMFQRTDYYKKKTIPEVTYYDIRKWLELDETIQFKGLNYDPNEELKKIEKKPFINLKAFYEINKVVANYSERTNETFSTLDYDGIGYALTVYKTDKDIRSYLKSSHNLPKRCYDDQLIEELLSLSYTKFGHLSLKAINHVLSIMQKGNTYKEAVDQLGYDTSGLKKEKRSKFLPPISDEITNPIVKRALTQARKVVNAIIRRHGSPHSVHIELARELSKNHDERTKIVSAQDENYKKNKGAISILSEHGILNPTGYDIVRYKLWKEQGERCAYSLKEIPADTFFNELKKERNGAPILEVDHILPYSQSFIDSYHNKVLVYSDENRKKGNRIPYTYFLETNKDWEAFERYVRSNKFFSKKKREYLLKRAYLPRESELIKERHLNDTRYASTFLKNFIEQNLQFKEAEDNPRKRRVQTVNGVITAHFRKRWGLEKDRQETYLHHAMDAIIVACTDHHMVTRVTEYYQIKESNKSVKKPYFPMPWEGFRDELLSHLASQPIAKKISEELKAGYQSLDYIFVSRMPKRSITGAAHKQTIMRKGGIDKKGKTIIIERLHLKDIKFDENGDFKMVGKEQDMATYEAIKQRYLEHGKNSKKAFETPLYKPSKKGTGNLIKRVKVEGQAKSFVREVNGGVAQNGDLVRVDLFEKDDKYYMVPIYVPDTVCSELPKKVVASSKGYEQWLTLDNSFTFKFSLYPYDLVRLVKGDEDRFLYFGTLDIDSDRLNFKDVNKPSKKNEYRYSLKTIEDLEKYEVGVLGDLRLVRKETRRNFH

SEQ ID NO: 2 - protein, 1150 aa, Enterococcus sp.
  REGION 1..1150: note = APG05586
MYSIGLDLGISSVGWSVIDEETGKIVDLGVRLFSAKNSEKNLERRTSRGARRLIRRKTNRLKDAKKLLEAIGFYEDKALKNVCPYQLRVKGLTEGLTKGELYKVVLHIVKKRGISYLDEDDAEAAKESQDYKEQVRKNAQLLTKYTPGQIQLQRLKENNRVKTGINGQGHYQLNVFKVSAYADELATILKTQQALYPNELTDDWIALFVQPGIAENAGLIYRKRPYYHGPGNEANNSPYGRWSDFQKTGQPAANIFDKLIGKDFQGELRASGLSLSAQQYNLLNDLTNLKIDGEVSLSPEQKEFILTELMTKEFARFGVNDIAKLLGVKKEQLSGWRLDKKGKPEIHTLKGYRNWRKIFAEAGIDLATLPTETIDCLAKVLTLNTEREGVENTLAFELPELAEPVKSLVLDHYKELSQSISTQAWHRFSLKTLHLLIPELIKSTSEQNTLLEQFQLKAGVRKRYSDYKKLPTKEVLAEIYNPTVNKTVSQAFKVMDALLEKYGKDQIHYITVEMPRDDNEEEERKRIKELQTKNSQRKNDSQQYFLQKSGWSQEKFQATIHKNRRFLAKLLYYFEQDGVCAYTGNPISPELLVSDSTEIDHIIPISISLDDSINNKVLVLSHANQVKGQQTPYDARMAGAFNKINGKFSNWDEYQKWVESRPFSRKKVNNLLETRNIFDSEQVQKFLSRNLNDTRYASRLVLNTLQSFFENQDTIVRVVNGSFTHTLRKKWGADLDKTRETHHHHAVDATLCAVTPFVKVSRYHYAVNEETGEKFMREIDVETGEILDEIPYREYKKAKHYERKTYQVKWSNFREQLKPITIHPKIKFSHQVDRKANRKLSDATIYSVREKTEVKTLKSGKEKITTDEYTIGKIKDIYTVDGWEAFKKKQDKLLMKEFDEKTYELLVTIAATTPDFQEVEEKNGKVKRVKRSPFAVYCEENGIPAIRKYAKKNNGPVIRSLKYYDGKLNKHINITKDEKGRPVEQTKNGRKVTLQSLKPYRYDIYQDLETKAYYTVQLYYSDLRFVEGEYGITEKEYMKKVAEQTKGQVVRFCFSLQKNDGLEIEWKDSQRYDVRFYNFQSANSINFKGLEQEMIPAENQFKQKPYNNGAINLNIAKYGKEGKKLRKFNTDILGKKHHLSYEKEPKNIIK

SEQ ID NO: 3 - protein, 1052 aa, Staphylococcus sp.
  REGION 1..1052: note = APG01604
MVTKYILGLDIGITSVGYGIINYEDKTIIDAGVRLFPEANVENNEGRRSKRGARRLKRRRIHRLDRIKQLLSEYNLVDLDNIPQSPSPYEIRVKGLREELSKDELVIALLHIAKRRGIHNVEAVDETQDEGNELSTKEQLAKNNNLLKDKYVCELLLERLKDGKVRGEKNRFKTTDIIKEVKQLLETQKEAHQLDDDFINRYIDLIETRREYFEGPGKGSPFGWGGDLKKWYETLMGHCTYFPNELRSVKYSYSADLFNALNDLNNLVIQREGNSKLEYHEKYHIIENVFKQKKKPTLKQIANEIGVSPDDIKGFRINKSGKETFTEFKLYHDLKKVLIDQSILENVQLLDQIAEILTIYQDKESIINELNQLSEIINEQDKESISNLSGYNGTHRLSLKCINLVIEELWHTSRNQMEIFTYLNIKPKKIDLAKTNKIPKNMIDEFILSPVVKRTFGQAINVINKVIEKYGVPEDIIIELARESNSKDKQKFINSLQKKNETTRKRINEIIGQYGNQNAKRLVEKIRLHDEQEGKCLYSLESIPLEDLINNPQYYEVDHIIPRSVSFDNSYQNKVLVKQTENSKKSNRTPYQYFNSGETKLSYNQFKQHVLNLSKSKDRISKKKKEYLLEERDINKYEVQKEFINRNLVDTRYATRELTNYLKAYFSANDMDVKVKTINGSFTDYLRKVWKFKKERNHGYKHHAEDALIIANADFLFKENKKLKKANAILEQPSLDNGKSDATVENDNEYVETFSIPKQVNDIKEFRDFKFSHRVDKKPNRQLINDTLYSTRKIENHTFIVSPITNIYSKDNDELKKKFNKNPEKFLMYQHDPKTFEKLEVIMKQYANEKNPLAKYHEETGEYLTKYSKKNNGPIVKTIKVLGDKVGKHLDVTHKYKYSNSKIVKKTINPYRFDVYLTDKGYKFITISYLDVLKKDNYYYILKEKYEELKIKKSISDTDQFIGSFYYNDLIKINDQIFKVVGVNNDLLNRIELDLLDISYKEYCKINNIKTNRIIKGITKKITNIEKFSTDVLGNLYKAHSNHPQLIFKQRD

SEQ ID NO: 4 - protein, 1130 aa, unidentified
  REGION 1..1130: note = LPG10145
MSKVAKNMTRVNLGFDIGIASVGWSVLDNQTGKILETGVSIFPSGSASRNEERRSFRQSRRLIRRKKARICDMDHLLKKNGFPFPGNTGANPYEIRVKGLTEKLSREELAIALHHLVKRRGISYDLKDVEDESAGGTNYQESIAVNQRLLKKETPAEIQLARLTECGKVRGQVKSLGEDNTATTLLNVFPNAAYQEEMVKLLKKQQEFYGEIDDPFMETAIGILSRKREYFIGPGSEKSRTDYGIYRTDGTTLKNLFEILVGKDKIFPDQYRAAGNSYTAQLYNLLNDLNNLEVDATEDGKLTTAHKEQIIEELTTTTGNVNMLKLIAKVAGTSPAGIKKYRVDREGKPEFHSLAIYRRLRKKLGEAGFEINEWPPEFFDDYGPIVTLNTESGELRKWLAEEGSRKYDFLTEPVIEAILANKSAFDSVGKNKWHRFSLKTMQLLIPELLHTFKEQMTILAEMGLLHENKKDYGDQNKVDVKYLTENLYNPVVRKSVKQAMDIFNALFEKYANIDYVVIEMPRDDAEDELEQKKQFQKFQLKNEKEKDASLKEFQELAGVSDLQLEAQLRKRKKLRQKIRMWYQQRGKCPYSGKTIAAVDLFHQDNQFEIDHIIPLSVSFDDGQNNKVLCYSEMNQEKGKQTPYAFMSRGGGQGFSALQAYVKSNNRLENAKKRNLLFTEDINDLEVRKRFIARNLVDTRYASRIVLNELQQFVRSKELDTRVTVIRGKLTSKLRDRWRLNKSRETHHHHAVDAAVIAVSPMLKMWEKNAEIIPLKVDENTVDLKSGEIITDQEYAAQMYELPYARFLEQMPELHKKIKFHHQVDKKMNRKVSDATLYSTRKAKVGTDKKEQEYVIGKIKDIYQFDQYKKFKKLYDGDKSKFLMQRLDPQTFAKLEKIMEDYPAKIDATQPNGTIKLVDISPFELYRREHGPVTKYAKKNNGPAIKSLKFYDSIVGSSVKITPKNAKGKEVILKSLKPWRTDVYYNHEKEQYEIMGIKYADLKFKGDNYGITKARYQEIKEEEGVSEESEFLFSLYRGDRIQVSNGEDKIDLLFLSRSNPAKKGYVELKPIDRNQLNGKEVVSVYGAASGGRLKKQFVKKNHTLHKVNTDILGNPFYIKKESDQPKNILDL

SEQ ID NO: 5 - protein, 167 aa, synthetic construct
  REGION 1..167: note = LPG50148 (minus starting methionine)
SNPEFTHEYWMRHALTLARRARDEGEVPVGAVLVLNNQVIGEGWNRAIGLHDPTAHAEIMALRQGGLVLQNYRLIDTTLYVTFEPCVMCSGAMVHSRIGTLVFGVRNSKRGAAGSLMNVLNYPGMNHQVKTIGGVLAPECSGLLCDFYRMPRQVFNQQKAELKSIND

SEQ ID NO: 6 - protein, 167 aa, synthetic construct
  REGION 1..167: note = LPG50148 V81S (minus starting methionine)
SNPEFTHEYWMRHALTLARRARDEGEVPVGAVLVLNNQVIGEGWNRAIGLHDPTAHAEIMALRQGGLVLQNYRLIDTTLYSTFEPCVMCSGAMVHSRIGTLVFGVRNSKRGAAGSLMNVLNYPGMNHQVKTIGGVLAPECSGLLCDFYRMPRQVFNQQKAELKSIND

SEQ ID NO: 7 - protein, 1271 aa, synthetic construct
  REGION 1..1271: note = LPG50148_nAPG07433.1_parental
MSNPEFTHEYWMRHALTLARRARDEGEVPVGAVLVLNNQVIGEGWNRAIGLHDPTAHAEIMALRQGGLVLQNYRLIDTTLYVTFEPCVMCSGAMVHSRIGTLVFGVRNSKRGAAGSLMNVLNYPGMNHQVKTIGGVLAPECSGLLCDFYRMPRQVFNQQKAELKSINDSGGSSGGSSGSETPGTSESATPESSGGSSGGSMRELDYRIGLAIGTNSIGWGVIELSWNKDRERYEKVRIVDQGVRMFDRAEMPKTGASLAEPRRIARSSRRRLNRKSQRKKNIRNLLVQHGVITQEELDSLYPLSKKSMDIWGIRLDGLDRLLNHFEWARLLIHLAQRRGFKSNRKSELKDTETGKVLSSIQLNEKRLSLYRTVGEMWMKDPDFSKYDRKRNSPNEYVFSVSRAELEKEIVTLFAAQRRFQSPYASKDLQETYLQIWTHQLPFASGNAILNKVGYCSLLKGKERRIPKATYTFQYFSALDQVNRTRLGPDFQPFTKEQREIILNNMFQRTDYYKKKTIPEVTYYDIRKWLELDETIQFKGLNYDPNEELKKIEKKPFINLKAFYEINKVVANYSERTNETFSTLDYDGIGYALTVYKTDKDIRSYLKSSHNLPKRCYDDQLIEELLSLSYTKFGHLSLKAINHVLSIMQKGNTYKEAVDQLGYDTSGLKKEKRSKFLPPISDEITNPIVKRALTQARKVVNAIIRRHGSPHSVHIELARELSKNHDERTKIVSAQDENYKKNKGAISILSEHGILNPTGYDIVRYKLWKEQGERCAYSLKEIPADTFFNELKKERNGAPILEVDHILPYSQSFIDSYHNKVLVYSDENRKKGNRIPYTYFLETNKDWEAFERYVRSNKFFSKKKREYLLKRAYLPRESELIKERHLNDTRYASTFLKNFIEQNLQFKEAEDNPRKRRVQTVNGVITAHFRKRWGLEKDRQETYLHHAMDAIIVACTDHHMVTRVTEYYQIKESNKSVKKPYFPMPWEGFRDELLSHLASQPIAKKISEELKAGYQSLDYIFVSRMPKRSITGAAHKQTIMRKGGIDKKGKTIIIERLHLKDIKFDENGDFKMVGKEQDMATYEAIKQRYLEHGKNSKKAFETPLYKPSKKGTGNLIKRVKVEGQAKSFVREVNGGVAQNGDLVRVDLFEKDDKYYMVPIYVPDTVCSELPKKVVASSKGYEQWLTLDNSFTFKFSLYPYDLVRLVKGDEDRFLYFGTLDIDSDRLNFKDVNKPSKKNEYRYSLKTIEDLEKYEVGVLGDLRLVRKETRRNFH

SEQ ID NO: 8 - protein, 1244 aa, synthetic construct
  REGION 1..1244: note = nAPG07433.1_inlaidS772_LPG50148 (LPG20002)
MRELDYRIGLAIGTNSIGWGVIELSWNKDRERYEKVRIVDQGVRMFDRAEMPKTGASLAEPRRIARSSRRRLNRKSQRKKNIRNLLVQHGVITQEELDSLYPLSKKSMDIWGIRLDGLDRLLNHFEWARLLIHLAQRRGFKSNRKSELKDTETGKVLSSIQLNEKRLSLYRTVGEMWMKDPDFSKYDRKRNSPNEYVFSVSRAELEKEIVTLFAAQRRFQSPYASKDLQETYLQIWTHQLPFASGNAILNKVGYCSLLKGKERRIPKATYTFQYFSALDQVNRTRLGPDFQPFTKEQREIILNNMFQRTDYYKKKTIPEVTYYDIRKWLELDETIQFKGLNYDPNEELKKIEKKPFINLKAFYEINKVVANYSERTNETFSTLDYDGIGYALTVYKTDKDIRSYLKSSHNLPKRCYDDQLIEELLSLSYTKFGHLSLKAINHVLSIMQKGNTYKEAVDQLGYDTSGLKKEKRSKFLPPISDEITNPIVKRALTQARKVVNAIIRRHGSPHSVHIELARELSKNHDERTKIVSAQDENYKKNKGAISILSEHGILNPTGYDIVRYKLWKEQGERCAYSLKEIPADTFFNELKKERNGAPILEVDHILPYSQSFIDSYHNKVLVYSDENRKKGNRIPYTYFLETNKDWEAFERYVRSNKFFSKKKREYLLKRAYLPRESELIKERHLNDTRYASTFLKNFIEQNLQFKEAEDNPRKRRVQTVNGVITAHFRKRWGLEKDRQETYLHHAMDAIIVACTDHHMVTRVTEYYQIKESGGSSNPEFTHEYWMRHALTLARRARDEGEVPVGAVLVLNNQVIGEGWNRAIGLHDPTAHAEIMALRQGGLVLQNYRLIDTTLYVTFEPCVMCSGAMVHSRIGTLVFGVRNSKRGAAGSLMNVLNYPGMNHQVKTIGGVLAPECSGLLCDFYRMPRQVFNQQKAELKSINDSGGNKSVKKPYFPMPWEGFRDELLSHLASQPIAKKISEELKAGYQSLDYIFVSRMPKRSITGAAHKQTIMRKGGIDKKGKTIIIERLHLKDIKFDENGDFKMVGKEQDMATYEAIKQRYLEHGKNSKKAFETPLYKPSKKGTGNLIKRVKVEGQAKSFVREVNGGVAQNGDLVRVDLFEKDDKYYMVPIYVPDTVCSELPKKVVASSKGYEQWLTLDNSFTFKFSLYPYDLVRLVKGDEDRFLYFGTLDIDSDRLNFKDVNKPSKKNEYRYSLKTIEDLEKYEVGVLGDLRLVRKETRRNFH

SEQ ID NO: 9 - protein, 1244 aa, synthetic construct
  REGION 1..1244: note = nAPG07433.1_inlaidS775_LPG50148 (LPG20003)
MRELDYRIGLAIGTNSIGWGVIELSWNKDRERYEKVRIVDQGVRMFDRAEMPKTGASLAEPRRIARSSRRRLNRKSQRKKNIRNLLVQHGVITQEELDSLYPLSKKSMDIWGIRLDGLDRLLNHFEWARLLIHLAQRRGFKSNRKSELKDTETGKVLSSIQLNEKRLSLYRTVGEMWMKDPDFSKYDRKRNSPNEYVFSVSRAELEKEIVTLFAAQRRFQSPYASKDLQETYLQIWTHQLPFASGNAILNKVGYCSLLKGKERRIPKATYTFQYFSALDQVNRTRLGPDFQPFTKEQREIILNNMFQRTDYYKKKTIPEVTYYDIRKWLELDETIQFKGLNYDPNEELKKIEKKPFINLKAFYEINKVVANYSERTNETFSTLDYDGIGYALTVYKTDKDIRSYLKSSHNLPKRCYDDQLIEELLSLSYTKFGHLSLKAINHVLSIMQKGNTYKEAVDQLGYDTSGLKKEKRSKFLPPISDEITNPIVKRALTQARKVVNAIIRRHGSPHSVHIELARELSKNHDERTKIVSAQDENYKKNKGAISILSEHGILNPTGYDIVRYKLWKEQGERCAYSLKEIPADTFFNELKKERNGAPILEVDHILPYSQSFIDSYHNKVLVYSDENRKKGNRIPYTYFLETNKDWEAFERYVRSNKFFSKKKREYLLKRAYLPRESELIKERHLNDTRYASTFLKNFIEQNLQFKEAEDNPRKRRVQTVNGVITAHFRKRWGLEKDRQETYLHHAMDAIIVACTDHHMVTRVTEYYQIKESNKSGGSSNPEFTHEYWMRHALTLARRARDEGEVPVGAVLVLNNQVIGEGWNRAIGLHDPTAHAEIMALRQGGLVLQNYRLIDTTLYVTFEPCVMCSGAMVHSRIGTLVFGVRNSKRGAAGSLMNVLNYPGMNHQVKTIGGVLAPECSGLLCDFYRMPRQVFNQQKAELKSINDSGGVKKPYFPMPWEGFRDELLSHLASQPIAKKISEELKAGYQSLDYIFVSRMPKRSITGAAHKQTIMRKGGIDKKGKTIIIERLHLKDIKFDENGDFKMVGKEQDMATYEAIKQRYLEHGKNSKKAFETPLYKPSKKGTGNLIKRVKVEGQAKSFVREVNGGVAQNGDLVRVDLFEKDDKYYMVPIYVPDTVCSELPKKVVASSKGYEQWLTLDNSFTFKFSLYPYDLVRLVKGDEDRFLYFGTLDIDSDRLNFKDVNKPSKKNEYRYSLKTIEDLEKYEVGVLGDLRLVRKETRRNFH

SEQ ID NO: 10 - protein, 1244 aa, synthetic construct
  REGION 1..1244: note = nAPG07433.1_inlaidK778_LPG50148 (LPG20004)
MRELDYRIGLAIGTNSIGWGVIELSWNKDRERYEKVRIVDQGVRMFDRAEMPKTGASLAEPRRIARSSRRRLNRKSQRKKNIRNLLVQHGVITQEELDSLYPLSKKSMDIWGIRLDGLDRLLNHFEWARLLIHLAQRRGFKSNRKSELKDTETGKVLSSIQLNEKRLSLYRTVGEMWMKDPDFSKYDRKRNSPNEYVFSVSRAELEKEIVTLFAAQRRFQSPYASKDLQETYLQIWTHQLPFASGNAILNKVGYCSLLKGKERRIPKATYTFQYFSALDQVNRTRLGPDFQPFTKEQREIILNNMFQRTDYYKKKTIPEVTYYDIRKWLELDETIQFKGLNYDPNEELKKIEKKPFINLKAFYEINKVVANYSERTNETFSTLDYDGIGYALTVYKTDKDIRSYLKSSHNLPKRCYDDQLIEELLSLSYTKFGHLSLKAINHVLSIMQKGNTYKEAVDQLGYDTSGLKKEKRSKFLPPISDEITNPIVKRALTQARKVVNAIIRRHGSPHSVHIELARELSKNHDERTKIVSAQDENYKKNKGAISILSEHGILNPTGYDIVRYKLWKEQGERCAYSLKEIPADTFFNELKKERNGAPILEVDHILPYSQSFIDSYHNKVLVYSDENRKKGNRIPYTYFLETNKDWEAFERYVRSNKFFSKKKREYLLKRAYLPRESELIKERHLNDTRYASTFLKNFIEQNLQFKEAEDNPRKRRVQTVNGVITAHFRKRWGLEKDRQETYLHHAMDAIIVACTDHHMVTRVTEYYQIKESNKSVKKGGSSNPEFTHEYWMRHALTLARRARDEGEVPVGAVLVLNNQVIGEGWNRAIGLHDPTAHAEIMALRQGGLVLQNYRLIDTTLYVTFEPCVMCSGAMVHSRIGTLVFGVRNSKRGAAGSLMNVLNYPGMNHQVKTIGGVLAPECSGLLCDFYRMPRQVFNQQKAELKSINDSGGPYFPMPWEGFRDELLSHLASQPIAKKISEELKAGYQSLDYIFVSRMPKRSITGAAHKQTIMRKGGIDKKGKTIIIERLHLKDIKFDENGDFKMVGKEQDMATYEAIKQRYLEHGKNSKKAFETPLYKPSKKGTGNLIKRVKVEGQAKSFVREVNGGVAQNGDLVRVDLFEKDDKYYMVPIYVPDTVCSELPKKVVASSKGYEQWLTLDNSFTFKFSLYPYDLVRLVKGDEDRFLYFGTLDIDSDRLNFKDVNKPSKKNEYRYSLKTIEDLEKYEVGVLGDLRLVRKETRRNFH

SEQ ID NO: 11 - protein, 1244 aa, synthetic construct
  REGION 1..1244: note = nAPG07433.1_inlaidE900_LPG50148 (LPG20005)
MRELDYRIGLAIGTNSIGWGVIELSWNKDRERYEKVRIVDQGVRMFDRAEMPKTGASLAEPRRIARSSRRRLNRKSQRKKNIRNLLVQHGVITQEELDSLYPLSKKSMDIWGIRLDGLDRLLNHFEWARLLIHLAQRRGFKSNRKSELKDTETGKVLSSIQLNEKRLSLYRTVGEMWMKDPDFSKYDRKRNSPNEYVFSVSRAELEKEIVTLFAAQRRFQSPYASKDLQETYLQIWTHQLPFASGNAILNKVGYCSLLKGKERRIPKATYTFQYFSALDQVNRTRLGPDFQPFTKEQREIILNNMFQRTDYYKKKTIPEVTYYDIRKWLELDETIQFKGLNYDPNEELKKIEKKPFINLKAFYEINKVVANYSERTNETFSTLDYDGIGYALTVYKTDKDIRSYLKSSHNLPKRCYDDQLIEELLSLSYTKFGHLSLKAINHVLSIMQKGNTYKEAVDQLGYDTSGLKKEKRSKFLPPISDEITNPIVKRALTQARKVVNAIIRRHGSPHSVHIELARELSKNHDERTKIVSAQDENYKKNKGAISILSEHGILNPTGYDIVRYKLWKEQGERCAYSLKEIPADTFFNELKKERNGAPILEVDHILPYSQSFIDSYHNKVLVYSDENRKKGNRIPYTYFLETNKDWEAFERYVRSNKFFSKKKREYLLKRAYLPRESELIKERHLNDTRYASTFLKNFIEQNLQFKEAEDNPRKRRVQTVNGVITAHFRKRWGLEKDRQETYLHHAMDAIIVACTDHHMVTRVTEYYQIKESNKSVKKPYFPMPWEGFRDELLSHLASQPIAKKISEELKAGYQSLDYIFVSRMPKRSITGAAHKQTIMRKGGIDKKGKTIIIERLHLKDIKFDENGDFKMVGKEQDMATYEAIKQRYLEHGKNSKKAFEGGSSNPEFTHEYWMRHALTLARRARDEGEVPVGAVLVLNNQVIGEGWNRAIGLHDPTAHAEIMALRQGGLVLQNYRLIDTTLYVTFEPCVMCSGAMVHSRIGTLVFGVRNSKRGAAGSLMNVLNYPGMNHQVKTIGGVLAPECSGLLCDFYRMPRQVFNQQKAELKSINDSGGTPLYKPSKKGTGNLIKRVKVEGQAKSFVREVNGGVAQNGDLVRVDLFEKDDKYYMVPIYVPDTVCSELPKKVVASSKGYEQWLTLDNSFTFKFSLYPYDLVRLVKGDEDRFLYFGTLDIDSDRLNFKDVNKPSKKNEYRYSLKTIEDLEKYEVGVLGDLRLVRKETRRNFH

SEQ ID NO: 12 - protein, 1244 aa, synthetic construct
  REGION 1..1244: note = nAPG07433.1_inlaidG910_LPG50148 (LPG20006)
MRELDYRIGLAIGTNSIGWGVIELSWNKDRERYEKVRIVDQGVRMFDRAEMPKTGASLAEPRRIARSSRRRLNRKSQRKKNIRNLLVQHGVITQEELDSLYPLSKKSMDIWGIRLDGLDRLLNHFEWARLLIHLAQRRGFKSNRKSELKDTETGKVLSSIQLNEKRLSLYRTVGEMWMKDPDFSKYDRKRNSPNEYVFSVSRAELEKEIVTLFAAQRRFQSPYASKDLQETYLQIWTHQLPFASGNAILNKVGYCSLLKGKERRIPKATYTFQYFSALDQVNRTRLGPDFQPFTKEQREIILNNMFQRTDYYKKKTIPEVTYYDIRKWLELDETIQFKGLNYDPNEELKKIEKKPFINLKAFYEINKVVANYSERTNETFSTLDYDGIGYALTVYKTDKDIRSYLKSSHNLPKRCYDDQLIEELLSLSYTKFGHLSLKAINHVLSIMQKGNTYKEAVDQLGYDTSGLKKEKRSKFLPPISDEITNPIVKRALTQARKVVNAIIRRHGSPHSVHIELARELSKNHDERTKIVSAQDENYKKNKGAISILSEHGILNPTGYDIVRYKLWKEQGERCAYSLKEIPADTFFNELKKERNGAPILEVDHILPYSQSFIDSYHNKVLVYSDENRKKGNRIPYTYFLETNKDWEAFERYVRSNKFFSKKKREYLLKRAYLPRESELIKERHLNDTRYASTFLKNFIEQNLQFKEAEDNPRKRRVQTVNGVITAHFRKRWGLEKDRQETYLHHAMDAIIVACTDHHMVTRVTEYYQIKESNKSVKKPYFPMPWEGFRDELLSHLASQPIAKKISEELKAGYQSLDYIFVSRMPKRSITGAAHKQTIMRKGGIDKKGKTIIIERLHLKDIKFDENGDFKMVGKEQDMATYEAIKQRYLEHGKNSKKAFETPLYKPSKKGGGSSNPEFTHEYWMRHALTLARRARDEGEVPVGAVLVLNNQVIGEGWNRAIGLHDPTAHAEIMALRQGGLVLQNYRLIDTTLYVTFEPCVMCSGAMVHSRIGTLVFGVRNSKRGAAGSLMNVLNYPGMNHQVKTIGGVLAPECSGLLCDFYRMPRQVFNQQKAELKSINDSGGTGNLIKRVKVEGQAKSFVREVNGGVAQNGDLVRVDLFEKDDKYYMVPIYVPDTVCSELPKKVVASSKGYEQWLTLDNSFTFKFSLYPYDLVRLVKGDEDRFLYFGTLDIDSDRLNFKDVNKPSKKNEYRYSLKTIEDLEKYEVGVLGDLRLVRKETRRNFH

SEQ ID NO: 13 - protein, 1244 aa, synthetic construct
  REGION 1..1244: note = nAPG07433.1_inlaidR30_LPG50148 (LPG20007)
MRELDYRIGLAIGTNSIGWGVIELSWNKDRGGSSNPEFTHEYWMRHALTLARRARDEGEVPVGAVLVLNNQVIGEGWNRAIGLHDPTAHAEIMALRQGGLVLQNYRLIDTTLYVTFEPCVMCSGAMVHSRIGTLVFGVRNSKRGAAGSLMNVLNYPGMNHQVKTIGGVLAPECSGLLCDFYRMPRQVFNQQKAELKSINDSGGERYEKVRIVDQGVRMFDRAEMPKTGASLAEPRRIARSSRRRLNRKSQRKKNIRNLLVQHGVITQEELDSLYPLSKKSMDIWGIRLDGLDRLLNHFEWARLLIHLAQRRGFKSNRKSELKDTETGKVLSSIQLNEKRLSLYRTVGEMWMKDPDFSKYDRKRNSPNEYVFSVSRAELEKEIVTLFAAQRRFQSPYASKDLQETYLQIWTHQLPFASGNAILNKVGYCSLLKGKERRIPKATYTFQYFSALDQVNRTRLGPDFQPFTKEQREIILNNMFQRTDYYKKKTIPEVTYYDIRKWLELDETIQFKGLNYDPNEELKKIEKKPFINLKAFYEINKVVANYSERTNETFSTLDYDGIGYALTVYKTDKDIRSYLKSSHNLPKRCYDDQLIEELLSLSYTKFGHLSLKAINHVLSIMQKGNTYKEAVDQLGYDTSGLKKEKRSKFLPPISDEITNPIVKRALTQARKVVNAIIRRHGSPHSVHIELARELSKNHDERTKIVSAQDENYKKNKGAISILSEHGILNPTGYDIVRYKLWKEQGERCAYSLKEIPADTFFNELKKERNGAPILEVDHILPYSQSFIDSYHNKVLVYSDENRKKGNRIPYTYFLETNKDWEAFERYVRSNKFFSKKKREYLLKRAYLPRESELIKERHLNDTRYASTFLKNFIEQNLQFKEAEDNPRKRRVQTVNGVITAHFRKRWGLEKDRQETYLHHAMDAIIVACTDHHMVTRVTEYYQIKESNKSVKKPYFPMPWEGFRDELLSHLASQPIAKKISEELKAGYQSLDYIFVSRMPKRSITGAAHKQTIMRKGGIDKKGKTIIIERLHLKDIKFDENGDFKMVGKEQDMATYEAIKQRYLEHGKNSKKAFETPLYKPSKKGTGNLIKRVKVEGQAKSFVREVNGGVAQNGDLVRVDLFEKDDKYYMVPIYVPDTVCSELPKKVVASSKGYEQWLTLDNSFTFKFSLYPYDLVRLVKGDEDRFLYFGTLDIDSDRLNFKDVNKPSKKNEYRYSLKTIEDLEKYEVGVLGDLRLVRKETRRNFH

SEQ ID NO: 14 - protein, 1244 aa, synthetic construct
  REGION 1..1244: note = nAPG07433.1_inlaidT642_LPG50148 (LPG20008
MRELDYRIGLAIGTNSIGWGVIELSWNKDRERYEKVRIVDQGVRMFDRAEMPKTGASLAEPRRIARSSRRRLNRKSQRKKNIRNLLVQHGVITQEELDSLYPLSKKSMDIWGIRLDGLDRLLNHFEWARLLIHLAQRRGFKSNRKSELKDTETGKVLSSIQLNEKRLSLYRTVGEMWMKDPDFSKYDRKRNSPNEYVFSVSRAELEKEIVTLFAAQRRFQSPYASKDLQETYLQIWTHQLPFASGNAILNKVGYCSLLKGKERRIPKATYTFQYFSALDQVNRTRLGPDFQPFTKEQREIILNNMFQRTDYYKKKTIPEVTYYDIRKWLELDETIQFKGLNYDPNEELKKIEKKPFINLKAFYEINKVVANYSERTNETFSTLDYDGIGYALTVYKTDKDIRSYLKSSHNLPKRCYDDQLIEELLSLSYTKFGHLSLKAINHVLSIMQKGNTYKEAVDQLGYDTSGLKKEKRSKFLPPISDEITNPIVKRALTQARKVVNAIIRRHGSPHSVHIELARELSKNHDERTKIVSAQDENYKKNKGAISILSEHGILNPTGYDIVRYKLWKEQGERCAYSLKEIPADTFFNELKKERNGAPILEVDHILPYSQSFIDSYHNKVLVYSDENRKKGNRIPYTYFLETGGSSNPEFTHEYWMRHALTLARRARDEGEVPVGAVLVLNNQVIGEGWNRAIGLHDPTAHAEIMALRQGGLVLQNYRLIDTTLYVTFEPCVMCSGAMVHSRIGTLVFGVRNSKRGAAGSLMNVLNYPGMNHQVKTIGGVLAPECSGLLCDFYRMPRQVFNQQKAELKSINDSGGNKDWEAFERYVRSNKFFSKKKREYLLKRAYLPRESELIKERHLNDTRYASTFLKNFIEQNLQFKEAEDNPRKRRVQTVNGVITAHFRKRWGLEKDRQETYLHHAMDAIIVACTDHHMVTRVTEYYQIKESNKSVKKPYFPMPWEGFRDELLSHLASQPIAKKISEELKAGYQSLDYIFVSRMPKRSITGAAHKQTIMRKGGIDKKGKTIIIERLHLKDIKFDENGDFKMVGKEQDMATYEAIKQRYLEHGKNSKKAFETPLYKPSKKGTGNLIKRVKVEGQAKSFVREVNGGVAQNGDLVRVDLFEKDDKYYMVPIYVPDTVCSELPKKVVASSKGYEQWLTLDNSFTFKFSLYPYDLVRLVKGDEDRFLYFGTLDIDSDRLNFKDVNKPSKKNEYRYSLKTIEDLEKYEVGVLGDLRLVRKETRRNFH

SEQ ID NO: 15 - protein, 1244 aa, synthetic construct
  REGION 1..1244: note = nAPG07433.1_inlaidR670_LPG50148 (LPG20009)
MRELDYRIGLAIGTNSIGWGVIELSWNKDRERYEKVRIVDQGVRMFDRAEMPKTGASLAEPRRIARSSRRRLNRKSQRKKNIRNLLVQHGVITQEELDSLYPLSKKSMDIWGIRLDGLDRLLNHFEWARLLIHLAQRRGFKSNRKSELKDTETGKVLSSIQLNEKRLSLYRTVGEMWMKDPDFSKYDRKRNSPNEYVFSVSRAELEKEIVTLFAAQRRFQSPYASKDLQETYLQIWTHQLPFASGNAILNKVGYCSLLKGKERRIPKATYTFQYFSALDQVNRTRLGPDFQPFTKEQREIILNNMFQRTDYYKKKTIPEVTYYDIRKWLELDETIQFKGLNYDPNEELKKIEKKPFINLKAFYEINKVVANYSERTNETFSTLDYDGIGYALTVYKTDKDIRSYLKSSHNLPKRCYDDQLIEELLSLSYTKFGHLSLKAINHVLSIMQKGNTYKEAVDQLGYDTSGLKKEKRSKFLPPISDEITNPIVKRALTQARKVVNAIIRRHGSPHSVHIELARELSKNHDERTKIVSAQDENYKKNKGAISILSEHGILNPTGYDIVRYKLWKEQGERCAYSLKEIPADTFFNELKKERNGAPILEVDHILPYSQSFIDSYHNKVLVYSDENRKKGNRIPYTYFLETNKDWEAFERYVRSNKFFSKKKREYLLKRGGSSNPEFTHEYWMRHALTLARRARDEGEVPVGAVLVLNNQVIGEGWNRAIGLHDPTAHAEIMALRQGGLVLQNYRLIDTTLYVTFEPCVMCSGAMVHSRIGTLVFGVRNSKRGAAGSLMNVLNYPGMNHQVKTIGGVLAPECSGLLCDFYRMPRQVFNQQKAELKSINDSGGAYLPRESELIKERHLNDTRYASTFLKNFIEQNLQFKEAEDNPRKRRVQTVNGVITAHFRKRWGLEKDRQETYLHHAMDAIIVACTDHHMVTRVTEYYQIKESNKSVKKPYFPMPWEGFRDELLSHLASQPIAKKISEELKAGYQSLDYIFVSRMPKRSITGAAHKQTIMRKGGIDKKGKTIIIERLHLKDIKFDENGDFKMVGKEQDMATYEAIKQRYLEHGKNSKKAFETPLYKPSKKGTGNLIKRVKVEGQAKSFVREVNGGVAQNGDLVRVDLFEKDDKYYMVPIYVPDTVCSELPKKVVASSKGYEQWLTLDNSFTFKFSLYPYDLVRLVKGDEDRFLYFGTLDIDSDRLNFKDVNKPSKKNEYRYSLKTIEDLEKYEVGVLGDLRLVRKETRRNFH

SEQ ID NO: 16 - protein, 1244 aa, synthetic construct
  REGION 1..1244: note = nAPG07433.1_inlaidD737_LPG50148 (LPG20010)
MRELDYRIGLAIGTNSIGWGVIELSWNKDRERYEKVRIVDQGVRMFDRAEMPKTGASLAEPRRIARSSRRRLNRKSQRKKNIRNLLVQHGVITQEELDSLYPLSKKSMDIWGIRLDGLDRLLNHFEWARLLIHLAQRRGFKSNRKSELKDTETGKVLSSIQLNEKRLSLYRTVGEMWMKDPDFSKYDRKRNSPNEYVFSVSRAELEKEIVTLFAAQRRFQSPYASKDLQETYLQIWTHQLPFASGNAILNKVGYCSLLKGKERRIPKATYTFQYFSALDQVNRTRLGPDFQPFTKEQREIILNNMFQRTDYYKKKTIPEVTYYDIRKWLELDETIQFKGLNYDPNEELKKIEKKPFINLKAFYEINKVVANYSERTNETFSTLDYDGIGYALTVYKTDKDIRSYLKSSHNLPKRCYDDQLIEELLSLSYTKFGHLSLKAINHVLSIMQKGNTYKEAVDQLGYDTSGLKKEKRSKFLPPISDEITNPIVKRALTQARKVVNAIIRRHGSPHSVHIELARELSKNHDERTKIVSAQDENYKKNKGAISILSEHGILNPTGYDIVRYKLWKEQGERCAYSLKEIPADTFFNELKKERNGAPILEVDHILPYSQSFIDSYHNKVLVYSDENRKKGNRIPYTYFLETNKDWEAFERYVRSNKFFSKKKREYLLKRAYLPRESELIKERHLNDTRYASTFLKNFIEQNLQFKEAEDNPRKRRVQTVNGVITAHFRKRWGLEKDGGSSNPEFTHEYWMRHALTLARRARDEGEVPVGAVLVLNNQVIGEGWNRAIGLHDPTAHAEIMALRQGGLVLQNYRLIDTTLYVTFEPCVMCSGAMVHSRIGTLVFGVRNSKRGAAGSLMNVLNYPGMNHQVKTIGGVLAPECSGLLCDFYRMPRQVFNQQKAELKSINDSGGRQETYLHHAMDAIIVACTDHHMVTRVTEYYQIKESNKSVKKPYFPMPWEGFRDELLSHLASQPIAKKISEELKAGYQSLDYIFVSRMPKRSITGAAHKQTIMRKGGIDKKGKTIIIERLHLKDIKFDENGDFKMVGKEQDMATYEAIKQRYLEHGKNSKKAFETPLYKPSKKGTGNLIKRVKVEGQAKSFVREVNGGVAQNGDLVRVDLFEKDDKYYMVPIYVPDTVCSELPKKVVASSKGYEQWLTLDNSFTFKFSLYPYDLVRLVKGDEDRFLYFGTLDIDSDRLNFKDVNKPSKKNEYRYSLKTIEDLEKYEVGVLGDLRLVRKETRRNFH

SEQ ID NO: 17 - protein, 1244 aa, synthetic construct
  REGION 1..1244: note = nAPG07433.1_inlaidA802_LPG50148 (LPG20011)
MRELDYRIGLAIGTNSIGWGVIELSWNKDRERYEKVRIVDQGVRMFDRAEMPKTGASLAEPRRIARSSRRRLNRKSQRKKNIRNLLVQHGVITQEELDSLYPLSKKSMDIWGIRLDGLDRLLNHFEWARLLIHLAQRRGFKSNRKSELKDTETGKVLSSIQLNEKRLSLYRTVGEMWMKDPDFSKYDRKRNSPNEYVFSVSRAELEKEIVTLFAAQRRFQSPYASKDLQETYLQIWTHQLPFASGNAILNKVGYCSLLKGKERRIPKATYTFQYFSALDQVNRTRLGPDFQPFTKEQREIILNNMFQRTDYYKKKTIPEVTYYDIRKWLELDETIQFKGLNYDPNEELKKIEKKPFINLKAFYEINKVVANYSERTNETFSTLDYDGIGYALTVYKTDKDIRSYLKSSHNLPKRCYDDQLIEELLSLSYTKFGHLSLKAINHVLSIMQKGNTYKEAVDQLGYDTSGLKKEKRSKFLPPISDEITNPIVKRALTQARKVVNAIIRRHGSPHSVHIELARELSKNHDERTKIVSAQDENYKKNKGAISILSEHGILNPTGYDIVRYKLWKEQGERCAYSLKEIPADTFFNELKKERNGAPILEVDHILPYSQSFIDSYHNKVLVYSDENRKKGNRIPYTYFLETNKDWEAFERYVRSNKFFSKKKREYLLKRAYLPRESELIKERHLNDTRYASTFLKNFIEQNLQFKEAEDNPRKRRVQTVNGVITAHFRKRWGLEKDRQETYLHHAMDAIIVACTDHHMVTRVTEYYQIKESNKSVKKPYFPMPWEGFRDELLSHLASQPIAGGSSNPEFTHEYWMRHALTLARRARDEGEVPVGAVLVLNNQVIGEGWNRAIGLHDPTAHAEIMALRQGGLVLQNYRLIDTTLYVTFEPCVMCSGAMVHSRIGTLVFGVRNSKRGAAGSLMNVLNYPGMNHQVKTIGGVLAPECSGLLCDFYRMPRQVFNQQKAELKSINDSGGKKISEELKAGYQSLDYIFVSRMPKRSITGAAHKQTIMRKGGIDKKGKTIIIERLHLKDIKFDENGDFKMVGKEQDMATYEAIKQRYLEHGKNSKKAFETPLYKPSKKGTGNLIKRVKVEGQAKSFVREVNGGVAQNGDLVRVDLFEKDDKYYMVPIYVPDTVCSELPKKVVASSKGYEQWLTLDNSFTFKFSLYPYDLVRLVKGDEDRFLYFGTLDIDSDRLNFKDVNKPSKKNEYRYSLKTIEDLEKYEVGVLGDLRLVRKETRRNFH

SEQ ID NO: 18 - protein, 1241 aa, synthetic construct
  REGION 1..1241: note = nAPG07433.1inlaidS772_LPG50148 (delNterlinker/ LPG20012)
MRELDYRIGLAIGTNSIGWGVIELSWNKDRERYEKVRIVDQGVRMFDRAEMPKTGASLAEPRRIARSSRRRLNRKSQRKKNIRNLLVQHGVITQEELDSLYPLSKKSMDIWGIRLDGLDRLLNHFEWARLLIHLAQRRGFKSNRKSELKDTETGKVLSSIQLNEKRLSLYRTVGEMWMKDPDFSKYDRKRNSPNEYVFSVSRAELEKEIVTLFAAQRRFQSPYASKDLQETYLQIWTHQLPFASGNAILNKVGYCSLLKGKERRIPKATYTFQYFSALDQVNRTRLGPDFQPFTKEQREIILNNMFQRTDYYKKKTIPEVTYYDIRKWLELDETIQFKGLNYDPNEELKKIEKKPFINLKAFYEINKVVANYSERTNETFSTLDYDGIGYALTVYKTDKDIRSYLKSSHNLPKRCYDDQLIEELLSLSYTKFGHLSLKAINHVLSIMQKGNTYKEAVDQLGYDTSGLKKEKRSKFLPPISDEITNPIVKRALTQARKVVNAIIRRHGSPHSVHIELARELSKNHDERTKIVSAQDENYKKNKGAISILSEHGILNPTGYDIVRYKLWKEQGERCAYSLKEIPADTFFNELKKERNGAPILEVDHILPYSQSFIDSYHNKVLVYSDENRKKGNRIPYTYFLETNKDWEAFERYVRSNKFFSKKKREYLLKRAYLPRESELIKERHLNDTRYASTFLKNFIEQNLQFKEAEDNPRKRRVQTVNGVITAHFRKRWGLEKDRQETYLHHAMDAIIVACTDHHMVTRVTEYYQIKESSNPEFTHEYWMRHALTLARRARDEGEVPVGAVLVLNNQVIGEGWNRAIGLHDPTAHAEIMALRQGGLVLQNYRLIDTTLYVTFEPCVMCSGAMVHSRIGTLVFGVRNSKRGAAGSLMNVLNYPGMNHQVKTIGGVLAPECSGLLCDFYRMPRQVFNQQKAELKSINDSGGNKSVKKPYFPMPWEGFRDELLSHLASQPIAKKISEELKAGYQSLDYIFVSRMPKRSITGAAHKQTIMRKGGIDKKGKTIIIERLHLKDIKFDENGDFKMVGKEQDMATYEAIKQRYLEHGKNSKKAFETPLYKPSKKGTGNLIKRVKVEGQAKSFVREVNGGVAQNGDLVRVDLFEKDDKYYMVPIYVPDTVCSELPKKVVASSKGYEQWLTLDNSFTFKFSLYPYDLVRLVKGDEDRFLYFGTLDIDSDRLNFKDVNKPSKKNEYRYSLKTIEDLEKYEVGVLGDLRLVRKETRRNFH

SEQ ID NO: 19 - protein, 1241 aa, synthetic construct
  REGION 1..1241: note = nAPG07433.1_inlaidS772LPG50148 (delCterlinker/ LPG20013)
MRELDYRIGLAIGTNSIGWGVIELSWNKDRERYEKVRIVDQGVRMFDRAEMPKTGASLAEPRRIARSSRRRLNRKSQRKKNIRNLLVQHGVITQEELDSLYPLSKKSMDIWGIRLDGLDRLLNHFEWARLLIHLAQRRGFKSNRKSELKDTETGKVLSSIQLNEKRLSLYRTVGEMWMKDPDFSKYDRKRNSPNEYVFSVSRAELEKEIVTLFAAQRRFQSPYASKDLQETYLQIWTHQLPFASGNAILNKVGYCSLLKGKERRIPKATYTFQYFSALDQVNRTRLGPDFQPFTKEQREIILNNMFQRTDYYKKKTIPEVTYYDIRKWLELDETIQFKGLNYDPNEELKKIEKKPFINLKAFYEINKVVANYSERTNETFSTLDYDGIGYALTVYKTDKDIRSYLKSSHNLPKRCYDDQLIEELLSLSYTKFGHLSLKAINHVLSIMQKGNTYKEAVDQLGYDTSGLKKEKRSKFLPPISDEITNPIVKRALTQARKVVNAIIRRHGSPHSVHIELARELSKNHDERTKIVSAQDENYKKNKGAISILSEHGILNPTGYDIVRYKLWKEQGERCAYSLKEIPADTFFNELKKERNGAPILEVDHILPYSQSFIDSYHNKVLVYSDENRKKGNRIPYTYFLETNKDWEAFERYVRSNKFFSKKKREYLLKRAYLPRESELIKERHLNDTRYASTFLKNFIEQNLQFKEAEDNPRKRRVQTVNGVITAHFRKRWGLEKDRQETYLHHAMDAIIVACTDHHMVTRVTEYYQIKESGGSSNPEFTHEYWMRHALTLARRARDEGEVPVGAVLVLNNQVIGEGWNRAIGLHDPTAHAEIMALRQGGLVLQNYRLIDTTLYVTFEPCVMCSGAMVHSRIGTLVFGVRNSKRGAAGSLMNVLNYPGMNHQVKTIGGVLAPECSGLLCDFYRMPRQVFNQQKAELKSINDNKSVKKPYFPMPWEGFRDELLSHLASQPIAKKISEELKAGYQSLDYIFVSRMPKRSITGAAHKQTIMRKGGIDKKGKTIIIERLHLKDIKFDENGDFKMVGKEQDMATYEAIKQRYLEHGKNSKKAFETPLYKPSKKGTGNLIKRVKVEGQAKSFVREVNGGVAQNGDLVRVDLFEKDDKYYMVPIYVPDTVCSELPKKVVASSKGYEQWLTLDNSFTFKFSLYPYDLVRLVKGDEDRFLYFGTLDIDSDRLNFKDVNKPSKKNEYRYSLKTIEDLEKYEVGVLGDLRLVRKETRRNFH

SEQ ID NO: 20 - protein, 1236 aa, synthetic construct
  REGION 1..1236: note = nAPG07433.1inlaidS772LPG50148_del1aaNandC (nolinker/1aaNandC/ LPG20014)
MRELDYRIGLAIGTNSIGWGVIELSWNKDRERYEKVRIVDQGVRMFDRAEMPKTGASLAEPRRIARSSRRRLNRKSQRKKNIRNLLVQHGVITQEELDSLYPLSKKSMDIWGIRLDGLDRLLNHFEWARLLIHLAQRRGFKSNRKSELKDTETGKVLSSIQLNEKRLSLYRTVGEMWMKDPDFSKYDRKRNSPNEYVFSVSRAELEKEIVTLFAAQRRFQSPYASKDLQETYLQIWTHQLPFASGNAILNKVGYCSLLKGKERRIPKATYTFQYFSALDQVNRTRLGPDFQPFTKEQREIILNNMFQRTDYYKKKTIPEVTYYDIRKWLELDETIQFKGLNYDPNEELKKIEKKPFINLKAFYEINKVVANYSERTNETFSTLDYDGIGYALTVYKTDKDIRSYLKSSHNLPKRCYDDQLIEELLSLSYTKFGHLSLKAINHVLSIMQKGNTYKEAVDQLGYDTSGLKKEKRSKFLPPISDEITNPIVKRALTQARKVVNAIIRRHGSPHSVHIELARELSKNHDERTKIVSAQDENYKKNKGAISILSEHGILNPTGYDIVRYKLWKEQGERCAYSLKEIPADTFFNELKKERNGAPILEVDHILPYSQSFIDSYHNKVLVYSDENRKKGNRIPYTYFLETNKDWEAFERYVRSNKFFSKKKREYLLKRAYLPRESELIKERHLNDTRYASTFLKNFIEQNLQFKEAEDNPRKRRVQTVNGVITAHFRKRWGLEKDRQETYLHHAMDAIIVACTDHHMVTRVTEYYQIKESNPEFTHEYWMRHALTLARRARDEGEVPVGAVLVLNNQVIGEGWNRAIGLHDPTAHAEIMALRQGGLVLQNYRLIDTTLYVTFEPCVMCSGAMVHSRIGTLVFGVRNSKRGAAGSLMNVLNYPGMNHQVKTIGGVLAPECSGLLCDFYRMPRQVFNQQKAELKSINNKSVKKPYFPMPWEGFRDELLSHLASQPIAKKISEELKAGYQSLDYIFVSRMPKRSITGAAHKQTIMRKGGIDKKGKTIIIERLHLKDIKFDENGDFKMVGKEQDMATYEAIKQRYLEHGKNSKKAFETPLYKPSKKGTGNLIKRVKVEGQAKSFVREVNGGVAQNGDLVRVDLFEKDDKYYMVPIYVPDTVCSELPKKVVASSKGYEQWLTLDNSFTFKFSLYPYDLVRLVKGDEDRFLYFGTLDIDSDRLNFKDVNKPSKKNEYRYSLKTIEDLEKYEVGVLGDLRLVRKETRRNFH

SEQ ID NO: 21 - protein, 1244 aa, synthetic construct
  REGION 1..1244: note = nAPG07433.1_inlaidS772_LPG50148+V81Smutant (LPG20015)
MRELDYRIGLAIGTNSIGWGVIELSWNKDRERYEKVRIVDQGVRMFDRAEMPKTGASLAEPRRIARSSRRRLNRKSQRKKNIRNLLVQHGVITQEELDSLYPLSKKSMDIWGIRLDGLDRLLNHFEWARLLIHLAQRRGFKSNRKSELKDTETGKVLSSIQLNEKRLSLYRTVGEMWMKDPDFSKYDRKRNSPNEYVFSVSRAELEKEIVTLFAAQRRFQSPYASKDLQETYLQIWTHQLPFASGNAILNKVGYCSLLKGKERRIPKATYTFQYFSALDQVNRTRLGPDFQPFTKEQREIILNNMFQRTDYYKKKTIPEVTYYDIRKWLELDETIQFKGLNYDPNEELKKIEKKPFINLKAFYEINKVVANYSERTNETFSTLDYDGIGYALTVYKTDKDIRSYLKSSHNLPKRCYDDQLIEELLSLSYTKFGHLSLKAINHVLSIMQKGNTYKEAVDQLGYDTSGLKKEKRSKFLPPISDEITNPIVKRALTQARKVVNAIIRRHGSPHSVHIELARELSKNHDERTKIVSAQDENYKKNKGAISILSEHGILNPTGYDIVRYKLWKEQGERCAYSLKEIPADTFFNELKKERNGAPILEVDHILPYSQSFIDSYHNKVLVYSDENRKKGNRIPYTYFLETNKDWEAFERYVRSNKFFSKKKREYLLKRAYLPRESELIKERHLNDTRYASTFLKNFIEQNLQFKEAEDNPRKRRVQTVNGVITAHFRKRWGLEKDRQETYLHHAMDAIIVACTDHHMVTRVTEYYQIKESGGSSNPEFTHEYWMRHALTLARRARDEGEVPVGAVLVLNNQVIGEGWNRAIGLHDPTAHAEIMALRQGGLVLQNYRLIDTTLYSTFEPCVMCSGAMVHSRIGTLVFGVRNSKRGAAGSLMNVLNYPGMNHQVKTIGGVLAPECSGLLCDFYRMPRQVFNQQKAELKSINDSGGNKSVKKPYFPMPWEGFRDELLSHLASQPIAKKISEELKAGYQSLDYIFVSRMPKRSITGAAHKQTIMRKGGIDKKGKTIIIERLHLKDIKFDENGDFKMVGKEQDMATYEAIKQRYLEHGKNSKKAFETPLYKPSKKGTGNLIKRVKVEGQAKSFVREVNGGVAQNGDLVRVDLFEKDDKYYMVPIYVPDTVCSELPKKVVASSKGYEQWLTLDNSFTFKFSLYPYDLVRLVKGDEDRFLYFGTLDIDSDRLNFKDVNKPSKKNEYRYSLKTIEDLEKYEVGVLGDLRLVRKETRRNFH

SEQ ID NO: 22 - protein, 1350 aa, synthetic construct
  REGION 1..1350: note = LPG50148+V81S_nAPG05586_parental
MSNPEFTHEYWMRHALTLARRARDEGEVPVGAVLVLNNQVIGEGWNRAIGLHDPTAHAEIMALRQGGLVLQNYRLIDTTLYSTFEPCVMCSGAMVHSRIGTLVFGVRNSKRGAAGSLMNVLNYPGMNHQVKTIGGVLAPECSGLLCDFYRMPRQVFNQQKAELKSINDSGGSSGGSSGSETPGTSESATPESSGGSSGGSMYSIGLALGISSVGWSVIDEETGKIVDLGVRLFSAKNSEKNLERRTSRGARRLIRRKTNRLKDAKKLLEAIGFYEDKALKNVCPYQLRVKGLTEGLTKGELYKVVLHIVKKRGISYLDEDDAEAAKESQDYKEQVRKNAQLLTKYTPGQIQLQRLKENNRVKTGINGQGHYQLNVFKVSAYADELATILKTQQALYPNELTDDWIALFVQPGIAENAGLIYRKRPYYHGPGNEANNSPYGRWSDFQKTGQPAANIFDKLIGKDFQGELRASGLSLSAQQYNLLNDLTNLKIDGEVSLSPEQKEFILTELMTKEFARFGVNDIAKLLGVKKEQLSGWRLDKKGKPEIHTLKGYRNWRKIFAEAGIDLATLPTETIDCLAKVLTLNTEREGVENTLAFELPELAEPVKSLVLDHYKELSQSISTQAWHRFSLKTLHLLIPELIKSTSEQNTLLEQFQLKAGVRKRYSDYKKLPTKEVLAEIYNPTVNKTVSQAFKVMDALLEKYGKDQIHYITVEMPRDDNEEEERKRIKELQTKNSQRKNDSQQYFLQKSGWSQEKFQATIHKNRRFLAKLLYYFEQDGVCAYTGNPISPELLVSDSTEIDHIIPISISLDDSINNKVLVLSHANQVKGQQTPYDARMAGAFNKINGKFSNWDEYQKWVESRPFSRKKVNNLLETRNIFDSEQVQKFLSRNLNDTRYASRLVLNTLQSFFENQDTIVRVVNGSFTHTLRKKWGADLDKTRETHHHHAVDATLCAVTPFVKVSRYHYAVNEETGEKFMREIDVETGEILDEIPYREYKKAKHYERKTYQVKWSNFREQLKPITIHPKIKFSHQVDRKANRKLSDATIYSVREKTEVKTLKSGKEKITTDEYTIGKIKDIYTVDGWEAFKKKQDKLLMKEFDEKTYELLVTIAATTPDFQEVEEKNGKVKRVKRSPFAVYCEENGIPAIRKYAKKNNGPVIRSLKYYDGKLNKHINITKDEKGRPVEQTKNGRKVTLQSLKPYRYDIYQDLETKAYYTVQLYYSDLRFVEGEYGITEKEYMKKVAEQTKGQVVRFCFSLQKNDGLEIEWKDSQRYDVRFYNFQSANSINFKGLEQEMIPAENQFKQKPYNNGAINLNIAKYGKEGKKLRKFNTDILGKKHHLSYEKEPKNIIK

SEQ ID NO: 23 - protein, 1323 aa, synthetic construct
  REGION 1..1323: note = nAPG05586_inlaidG342_LPG50148+V81S (LPG20016)
MYSIGLALGISSVGWSVIDEETGKIVDLGVRLFSAKNSEKNLERRTSRGARRLIRRKTNRLKDAKKLLEAIGFYEDKALKNVCPYQLRVKGLTEGLTKGELYKVVLHIVKKRGISYLDEDDAEAAKESQDYKEQVRKNAQLLTKYTPGQIQLQRLKENNRVKTGINGQGHYQLNVFKVSAYADELATILKTQQALYPNELTDDWIALFVQPGIAENAGLIYRKRPYYHGPGNEANNSPYGRWSDFQKTGQPAANIFDKLIGKDFQGELRASGLSLSAQQYNLLNDLTNLKIDGEVSLSPEQKEFILTELMTKEFARFGVNDIAKLLGVKKEQLSGWRLDKKGSGGSNPEFTHEYWMRHALTLARRARDEGEVPVGAVLVLNNQVIGEGWNRAIGLHDPTAHAEIMALRQGGLVLQNYRLIDTTLYSTFEPCVMCSGAMVHSRIGTLVFGVRNSKRGAAGSLMNVLNYPGMNHQVKTIGGVLAPECSGLLCDFYRMPRQVFNQQKAELKSINDGGSKPEIHTLKGYRNWRKIFAEAGIDLATLPTETIDCLAKVLTLNTEREGVENTLAFELPELAEPVKSLVLDHYKELSQSISTQAWHRFSLKTLHLLIPELIKSTSEQNTLLEQFQLKAGVRKRYSDYKKLPTKEVLAEIYNPTVNKTVSQAFKVMDALLEKYGKDQIHYITVEMPRDDNEEEERKRIKELQTKNSQRKNDSQQYFLQKSGWSQEKFQATIHKNRRFLAKLLYYFEQDGVCAYTGNPISPELLVSDSTEIDHIIPISISLDDSINNKVLVLSHANQVKGQQTPYDARMAGAFNKINGKFSNWDEYQKWVESRPFSRKKVNNLLETRNIFDSEQVQKFLSRNLNDTRYASRLVLNTLQSFFENQDTIVRVVNGSFTHTLRKKWGADLDKTRETHHHHAVDATLCAVTPFVKVSRYHYAVNEETGEKFMREIDVETGEILDEIPYREYKKAKHYERKTYQVKWSNFREQLKPITIHPKIKFSHQVDRKANRKLSDATIYSVREKTEVKTLKSGKEKITTDEYTIGKIKDIYTVDGWEAFKKKQDKLLMKEFDEKTYELLVTIAATTPDFQEVEEKNGKVKRVKRSPFAVYCEENGIPAIRKYAKKNNGPVIRSLKYYDGKLNKHINITKDEKGRPVEQTKNGRKVTLQSLKPYRYDIYQDLETKAYYTVQLYYSDLRFVEGEYGITEKEYMKKVAEQTKGQVVRFCFSLQKNDGLEIEWKDSQRYDVRFYNFQSANSINFKGLEQEMIPAENQFKQKPYNNGAINLNIAKYGKEGKKLRKFNTDILGKKHHLSYEKEPKNIIK

SEQ ID NO: 24 - protein, 1323 aa, synthetic construct
  REGION 1..1323: note = nAPG05586_inlaidD518_LPG50148+V81S (LPG20017)
MYSIGLALGISSVGWSVIDEETGKIVDLGVRLFSAKNSEKNLERRTSRGARRLIRRKTNRLKDAKKLLEAIGFYEDKALKNVCPYQLRVKGLTEGLTKGELYKVVLHIVKKRGISYLDEDDAEAAKESQDYKEQVRKNAQLLTKYTPGQIQLQRLKENNRVKTGINGQGHYQLNVFKVSAYADELATILKTQQALYPNELTDDWIALFVQPGIAENAGLIYRKRPYYHGPGNEANNSPYGRWSDFQKTGQPAANIFDKLIGKDFQGELRASGLSLSAQQYNLLNDLTNLKIDGEVSLSPEQKEFILTELMTKEFARFGVNDIAKLLGVKKEQLSGWRLDKKGKPEIHTLKGYRNWRKIFAEAGIDLATLPTETIDCLAKVLTLNTEREGVENTLAFELPELAEPVKSLVLDHYKELSQSISTQAWHRFSLKTLHLLIPELIKSTSEQNTLLEQFQLKAGVRKRYSDYKKLPTKEVLAEIYNPTVNKTVSQAFKVMDALLEKYGKDQIHYITVEMPRDDSGGSNPEFTHEYWMRHALTLARRARDEGEVPVGAVLVLNNQVIGEGWNRAIGLHDPTAHAEIMALRQGGLVLQNYRLIDTTLYSTFEPCVMCSGAMVHSRIGTLVFGVRNSKRGAAGSLMNVLNYPGMNHQVKTIGGVLAPECSGLLCDFYRMPRQVFNQQKAELKSINDGGSNEEEERKRIKELQTKNSQRKNDSQQYFLQKSGWSQEKFQATIHKNRRFLAKLLYYFEQDGVCAYTGNPISPELLVSDSTEIDHIIPISISLDDSINNKVLVLSHANQVKGQQTPYDARMAGAFNKINGKFSNWDEYQKWVESRPFSRKKVNNLLETRNIFDSEQVQKFLSRNLNDTRYASRLVLNTLQSFFENQDTIVRVVNGSFTHTLRKKWGADLDKTRETHHHHAVDATLCAVTPFVKVSRYHYAVNEETGEKFMREIDVETGEILDEIPYREYKKAKHYERKTYQVKWSNFREQLKPITIHPKIKFSHQVDRKANRKLSDATIYSVREKTEVKTLKSGKEKITTDEYTIGKIKDIYTVDGWEAFKKKQDKLLMKEFDEKTYELLVTIAATTPDFQEVEEKNGKVKRVKRSPFAVYCEENGIPAIRKYAKKNNGPVIRSLKYYDGKLNKHINITKDEKGRPVEQTKNGRKVTLQSLKPYRYDIYQDLETKAYYTVQLYYSDLRFVEGEYGITEKEYMKKVAEQTKGQVVRFCFSLQKNDGLEIEWKDSQRYDVRFYNFQSANSINFKGLEQEMIPAENQFKQKPYNNGAINLNIAKYGKEGKKLRKFNTDILGKKHHLSYEKEPKNIIK

SEQ ID NO: 25 - protein, 1323 aa, synthetic construct
  REGION 1..1323: note = nAPG05586_inlaidQ630_LPG50148+V81S (LPG20018)
MYSIGLALGISSVGWSVIDEETGKIVDLGVRLFSAKNSEKNLERRTSRGARRLIRRKTNRLKDAKKLLEAIGFYEDKALKNVCPYQLRVKGLTEGLTKGELYKVVLHIVKKRGISYLDEDDAEAAKESQDYKEQVRKNAQLLTKYTPGQIQLQRLKENNRVKTGINGQGHYQLNVFKVSAYADELATILKTQQALYPNELTDDWIALFVQPGIAENAGLIYRKRPYYHGPGNEANNSPYGRWSDFQKTGQPAANIFDKLIGKDFQGELRASGLSLSAQQYNLLNDLTNLKIDGEVSLSPEQKEFILTELMTKEFARFGVNDIAKLLGVKKEQLSGWRLDKKGKPEIHTLKGYRNWRKIFAEAGIDLATLPTETIDCLAKVLTLNTEREGVENTLAFELPELAEPVKSLVLDHYKELSQSISTQAWHRFSLKTLHLLIPELIKSTSEQNTLLEQFQLKAGVRKRYSDYKKLPTKEVLAEIYNPTVNKTVSQAFKVMDALLEKYGKDQIHYITVEMPRDDNEEEERKRIKELQTKNSQRKNDSQQYFLQKSGWSQEKFQATIHKNRRFLAKLLYYFEQDGVCAYTGNPISPELLVSDSTEIDHIIPISISLDDSINNKVLVLSHANQVKGQQSGGSNPEFTHEYWMRHALTLARRARDEGEVPVGAVLVLNNQVIGEGWNRAIGLHDPTAHAEIMALRQGGLVLQNYRLIDTTLYSTFEPCVMCSGAMVHSRIGTLVFGVRNSKRGAAGSLMNVLNYPGMNHQVKTIGGVLAPECSGLLCDFYRMPRQVFNQQKAELKSINDGGSTPYDARMAGAFNKINGKFSNWDEYQKWVESRPFSRKKVNNLLETRNIFDSEQVQKFLSRNLNDTRYASRLVLNTLQSFFENQDTIVRVVNGSFTHTLRKKWGADLDKTRETHHHHAVDATLCAVTPFVKVSRYHYAVNEETGEKFMREIDVETGEILDEIPYREYKKAKHYERKTYQVKWSNFREQLKPITIHPKIKFSHQVDRKANRKLSDATIYSVREKTEVKTLKSGKEKITTDEYTIGKIKDIYTVDGWEAFKKKQDKLLMKEFDEKTYELLVTIAATTPDFQEVEEKNGKVKRVKRSPFAVYCEENGIPAIRKYAKKNNGPVIRSLKYYDGKLNKHINITKDEKGRPVEQTKNGRKVTLQSLKPYRYDIYQDLETKAYYTVQLYYSDLRFVEGEYGITEKEYMKKVAEQTKGQVVRFCFSLQKNDGLEIEWKDSQRYDVRFYNFQSANSINFKGLEQEMIPAENQFKQKPYNNGAINLNIAKYGKEGKKLRKFNTDILGKKHHLSYEKEPKNIIK

SEQ ID NO: 26 - protein, 1323 aa, synthetic construct
  REGION 1..1323: note = nAPG05586_inlaidR661_LPG50148+V81S (LPG20019)
MYSIGLALGISSVGWSVIDEETGKIVDLGVRLFSAKNSEKNLERRTSRGARRLIRRKTNRLKDAKKLLEAIGFYEDKALKNVCPYQLRVKGLTEGLTKGELYKVVLHIVKKRGISYLDEDDAEAAKESQDYKEQVRKNAQLLTKYTPGQIQLQRLKENNRVKTGINGQGHYQLNVFKVSAYADELATILKTQQALYPNELTDDWIALFVQPGIAENAGLIYRKRPYYHGPGNEANNSPYGRWSDFQKTGQPAANIFDKLIGKDFQGELRASGLSLSAQQYNLLNDLTNLKIDGEVSLSPEQKEFILTELMTKEFARFGVNDIAKLLGVKKEQLSGWRLDKKGKPEIHTLKGYRNWRKIFAEAGIDLATLPTETIDCLAKVLTLNTEREGVENTLAFELPELAEPVKSLVLDHYKELSQSISTQAWHRFSLKTLHLLIPELIKSTSEQNTLLEQFQLKAGVRKRYSDYKKLPTKEVLAEIYNPTVNKTVSQAFKVMDALLEKYGKDQIHYITVEMPRDDNEEEERKRIKELQTKNSQRKNDSQQYFLQKSGWSQEKFQATIHKNRRFLAKLLYYFEQDGVCAYTGNPISPELLVSDSTEIDHIIPISISLDDSINNKVLVLSHANQVKGQQTPYDARMAGAFNKINGKFSNWDEYQKWVESRSGGSNPEFTHEYWMRHALTLARRARDEGEVPVGAVLVLNNQVIGEGWNRAIGLHDPTAHAEIMALRQGGLVLQNYRLIDTTLYSTFEPCVMCSGAMVHSRIGTLVFGVRNSKRGAAGSLMNVLNYPGMNHQVKTIGGVLAPECSGLLCDFYRMPRQVFNQQKAELKSINDGGSPFSRKKVNNLLETRNIFDSEQVQKFLSRNLNDTRYASRLVLNTLQSFFENQDTIVRVVNGSFTHTLRKKWGADLDKTRETHHHHAVDATLCAVTPFVKVSRYHYAVNEETGEKFMREIDVETGEILDEIPYREYKKAKHYERKTYQVKWSNFREQLKPITIHPKIKFSHQVDRKANRKLSDATIYSVREKTEVKTLKSGKEKITTDEYTIGKIKDIYTVDGWEAFKKKQDKLLMKEFDEKTYELLVTIAATTPDFQEVEEKNGKVKRVKRSPFAVYCEENGIPAIRKYAKKNNGPVIRSLKYYDGKLNKHINITKDEKGRPVEQTKNGRKVTLQSLKPYRYDIYQDLETKAYYTVQLYYSDLRFVEGEYGITEKEYMKKVAEQTKGQVVRFCFSLQKNDGLEIEWKDSQRYDVRFYNFQSANSINFKGLEQEMIPAENQFKQKPYNNGAINLNIAKYGKEGKKLRKFNTDILGKKHHLSYEKEPKNIIK

SEQ ID NO: 27 - protein, 1323 aa, synthetic construct
  REGION 1..1323: note = nAPG05586_inlaidF678_LPG50148+V81S (LPG20020)
MYSIGLALGISSVGWSVIDEETGKIVDLGVRLFSAKNSEKNLERRTSRGARRLIRRKTNRLKDAKKLLEAIGFYEDKALKNVCPYQLRVKGLTEGLTKGELYKVVLHIVKKRGISYLDEDDAEAAKESQDYKEQVRKNAQLLTKYTPGQIQLQRLKENNRVKTGINGQGHYQLNVFKVSAYADELATILKTQQALYPNELTDDWIALFVQPGIAENAGLIYRKRPYYHGPGNEANNSPYGRWSDFQKTGQPAANIFDKLIGKDFQGELRASGLSLSAQQYNLLNDLTNLKIDGEVSLSPEQKEFILTELMTKEFARFGVNDIAKLLGVKKEQLSGWRLDKKGKPEIHTLKGYRNWRKIFAEAGIDLATLPTETIDCLAKVLTLNTEREGVENTLAFELPELAEPVKSLVLDHYKELSQSISTQAWHRFSLKTLHLLIPELIKSTSEQNTLLEQFQLKAGVRKRYSDYKKLPTKEVLAEIYNPTVNKTVSQAFKVMDALLEKYGKDQIHYITVEMPRDDNEEEERKRIKELQTKNSQRKNDSQQYFLQKSGWSQEKFQATIHKNRRFLAKLLYYFEQDGVCAYTGNPISPELLVSDSTEIDHIIPISISLDDSINNKVLVLSHANQVKGQQTPYDARMAGAFNKINGKFSNWDEYQKWVESRPFSRKKVNNLLETRNIFSGGSNPEFTHEYWMRHALTLARRARDEGEVPVGAVLVLNNQVIGEGWNRAIGLHDPTAHAEIMALRQGGLVLQNYRLIDTTLYSTFEPCVMCSGAMVHSRIGTLVFGVRNSKRGAAGSLMNVLNYPGMNHQVKTIGGVLAPECSGLLCDFYRMPRQVFNQQKAELKSINDGGSDSEQVQKFLSRNLNDTRYASRLVLNTLQSFFENQDTIVRVVNGSFTHTLRKKWGADLDKTRETHHHHAVDATLCAVTPFVKVSRYHYAVNEETGEKFMREIDVETGEILDEIPYREYKKAKHYERKTYQVKWSNFREQLKPITIHPKIKFSHQVDRKANRKLSDATIYSVREKTEVKTLKSGKEKITTDEYTIGKIKDIYTVDGWEAFKKKQDKLLMKEFDEKTYELLVTIAATTPDFQEVEEKNGKVKRVKRSPFAVYCEENGIPAIRKYAKKNNGPVIRSLKYYDGKLNKHINITKDEKGRPVEQTKNGRKVTLQSLKPYRYDIYQDLETKAYYTVQLYYSDLRFVEGEYGITEKEYMKKVAEQTKGQVVRFCFSLQKNDGLEIEWKDSQRYDVRFYNFQSANSINFKGLEQEMIPAENQFKQKPYNNGAINLNIAKYGKEGKKLRKFNTDILGKKHHLSYEKEPKNIIK

SEQ ID NO: 28 - protein, 1323 aa, synthetic construct
  REGION 1..1323: note = nAPG05586_inlaidD736_LPG50148+V81S (LPG20021)
MYSIGLALGISSVGWSVIDEETGKIVDLGVRLFSAKNSEKNLERRTSRGARRLIRRKTNRLKDAKKLLEAIGFYEDKALKNVCPYQLRVKGLTEGLTKGELYKVVLHIVKKRGISYLDEDDAEAAKESQDYKEQVRKNAQLLTKYTPGQIQLQRLKENNRVKTGINGQGHYQLNVFKVSAYADELATILKTQQALYPNELTDDWIALFVQPGIAENAGLIYRKRPYYHGPGNEANNSPYGRWSDFQKTGQPAANIFDKLIGKDFQGELRASGLSLSAQQYNLLNDLTNLKIDGEVSLSPEQKEFILTELMTKEFARFGVNDIAKLLGVKKEQLSGWRLDKKGKPEIHTLKGYRNWRKIFAEAGIDLATLPTETIDCLAKVLTLNTEREGVENTLAFELPELAEPVKSLVLDHYKELSQSISTQAWHRFSLKTLHLLIPELIKSTSEQNTLLEQFQLKAGVRKRYSDYKKLPTKEVLAEIYNPTVNKTVSQAFKVMDALLEKYGKDQIHYITVEMPRDDNEEEERKRIKELQTKNSQRKNDSQQYFLQKSGWSQEKFQATIHKNRRFLAKLLYYFEQDGVCAYTGNPISPELLVSDSTEIDHIIPISISLDDSINNKVLVLSHANQVKGQQTPYDARMAGAFNKINGKFSNWDEYQKWVESRPFSRKKVNNLLETRNIFDSEQVQKFLSRNLNDTRYASRLVLNTLQSFFENQDTIVRVVNGSFTHTLRKKWGADLDSGGSNPEFTHEYWMRHALTLARRARDEGEVPVGAVLVLNNQVIGEGWNRAIGLHDPTAHAEIMALRQGGLVLQNYRLIDTTLYSTFEPCVMCSGAMVHSRIGTLVFGVRNSKRGAAGSLMNVLNYPGMNHQVKTIGGVLAPECSGLLCDFYRMPRQVFNQQKAELKSINDGGSKTRETHHHHAVDATLCAVTPFVKVSRYHYAVNEETGEKFMREIDVETGEILDEIPYREYKKAKHYERKTYQVKWSNFREQLKPITIHPKIKFSHQVDRKANRKLSDATIYSVREKTEVKTLKSGKEKITTDEYTIGKIKDIYTVDGWEAFKKKQDKLLMKEFDEKTYELLVTIAATTPDFQEVEEKNGKVKRVKRSPFAVYCEENGIPAIRKYAKKNNGPVIRSLKYYDGKLNKHINITKDEKGRPVEQTKNGRKVTLQSLKPYRYDIYQDLETKAYYTVQLYYSDLRFVEGEYGITEKEYMKKVAEQTKGQVVRFCFSLQKNDGLEIEWKDSQRYDVRFYNFQSANSINFKGLEQEMIPAENQFKQKPYNNGAINLNIAKYGKEGKKLRKFNTDILGKKHHLSYEKEPKNIIK

SEQ ID NO: 29 - protein, 1323 aa, synthetic construct
  REGION 1..1323: note = nAPG05586_inlaidE778_LPG50148+V81S (LPG20022)
MYSIGLALGISSVGWSVIDEETGKIVDLGVRLFSAKNSEKNLERRTSRGARRLIRRKTNRLKDAKKLLEAIGFYEDKALKNVCPYQLRVKGLTEGLTKGELYKVVLHIVKKRGISYLDEDDAEAAKESQDYKEQVRKNAQLLTKYTPGQIQLQRLKENNRVKTGINGQGHYQLNVFKVSAYADELATILKTQQALYPNELTDDWIALFVQPGIAENAGLIYRKRPYYHGPGNEANNSPYGRWSDFQKTGQPAANIFDKLIGKDFQGELRASGLSLSAQQYNLLNDLTNLKIDGEVSLSPEQKEFILTELMTKEFARFGVNDIAKLLGVKKEQLSGWRLDKKGKPEIHTLKGYRNWRKIFAEAGIDLATLPTETIDCLAKVLTLNTEREGVENTLAFELPELAEPVKSLVLDHYKELSQSISTQAWHRFSLKTLHLLIPELIKSTSEQNTLLEQFQLKAGVRKRYSDYKKLPTKEVLAEIYNPTVNKTVSQAFKVMDALLEKYGKDQIHYITVEMPRDDNEEEERKRIKELQTKNSQRKNDSQQYFLQKSGWSQEKFQATIHKNRRFLAKLLYYFEQDGVCAYTGNPISPELLVSDSTEIDHIIPISISLDDSINNKVLVLSHANQVKGQQTPYDARMAGAFNKINGKFSNWDEYQKWVESRPFSRKKVNNLLETRNIFDSEQVQKFLSRNLNDTRYASRLVLNTLQSFFENQDTIVRVVNGSFTHTLRKKWGADLDKTRETHHHHAVDATLCAVTPFVKVSRYHYAVNEETGEKFMRESGGSNPEFTHEYWMRHALTLARRARDEGEVPVGAVLVLNNQVIGEGWNRAIGLHDPTAHAEIMALRQGGLVLQNYRLIDTTLYSTFEPCVMCSGAMVHSRIGTLVFGVRNSKRGAAGSLMNVLNYPGMNHQVKTIGGVLAPECSGLLCDFYRMPRQVFNQQKAELKSINDGGSIDVETGEILDEIPYREYKKAKHYERKTYQVKWSNFREQLKPITIHPKIKFSHQVDRKANRKLSDATIYSVREKTEVKTLKSGKEKITTDEYTIGKIKDIYTVDGWEAFKKKQDKLLMKEFDEKTYELLVTIAATTPDFQEVEEKNGKVKRVKRSPFAVYCEENGIPAIRKYAKKNNGPVIRSLKYYDGKLNKHINITKDEKGRPVEQTKNGRKVTLQSLKPYRYDIYQDLETKAYYTVQLYYSDLRFVEGEYGITEKEYMKKVAEQTKGQVVRFCFSLQKNDGLEIEWKDSQRYDVRFYNFQSANSINFKGLEQEMIPAENQFKQKPYNNGAINLNIAKYGKEGKKLRKFNTDILGKKHHLSYEKEPKNIIK

SEQ ID NO: 30 - protein, 1323 aa, synthetic construct
  REGION 1..1323: note = nAPG05586_inlaidD788_LPG50148+V81S (LPG20023)
MYSIGLALGISSVGWSVIDEETGKIVDLGVRLFSAKNSEKNLERRTSRGARRLIRRKTNRLKDAKKLLEAIGFYEDKALKNVCPYQLRVKGLTEGLTKGELYKVVLHIVKKRGISYLDEDDAEAAKESQDYKEQVRKNAQLLTKYTPGQIQLQRLKENNRVKTGINGQGHYQLNVFKVSAYADELATILKTQQALYPNELTDDWIALFVQPGIAENAGLIYRKRPYYHGPGNEANNSPYGRWSDFQKTGQPAANIFDKLIGKDFQGELRASGLSLSAQQYNLLNDLTNLKIDGEVSLSPEQKEFILTELMTKEFARFGVNDIAKLLGVKKEQLSGWRLDKKGKPEIHTLKGYRNWRKIFAEAGIDLATLPTETIDCLAKVLTLNTEREGVENTLAFELPELAEPVKSLVLDHYKELSQSISTQAWHRFSLKTLHLLIPELIKSTSEQNTLLEQFQLKAGVRKRYSDYKKLPTKEVLAEIYNPTVNKTVSQAFKVMDALLEKYGKDQIHYITVEMPRDDNEEEERKRIKELQTKNSQRKNDSQQYFLQKSGWSQEKFQATIHKNRRFLAKLLYYFEQDGVCAYTGNPISPELLVSDSTEIDHIIPISISLDDSINNKVLVLSHANQVKGQQTPYDARMAGAFNKINGKFSNWDEYQKWVESRPFSRKKVNNLLETRNIFDSEQVQKFLSRNLNDTRYASRLVLNTLQSFFENQDTIVRVVNGSFTHTLRKKWGADLDKTRETHHHHAVDATLCAVTPFVKVSRYHYAVNEETGEKFMREIDVETGEILDSGGSNPEFTHEYWMRHALTLARRARDEGEVPVGAVLVLNNQVIGEGWNRAIGLHDPTAHAEIMALRQGGLVLQNYRLIDTTLYSTFEPCVMCSGAMVHSRIGTLVFGVRNSKRGAAGSLMNVLNYPGMNHQVKTIGGVLAPECSGLLCDFYRMPRQVFNQQKAELKSINDGGSEIPYREYKKAKHYERKTYQVKWSNFREQLKPITIHPKIKFSHQVDRKANRKLSDATIYSVREKTEVKTLKSGKEKITTDEYTIGKIKDIYTVDGWEAFKKKQDKLLMKEFDEKTYELLVTIAATTPDFQEVEEKNGKVKRVKRSPFAVYCEENGIPAIRKYAKKNNGPVIRSLKYYDGKLNKHINITKDEKGRPVEQTKNGRKVTLQSLKPYRYDIYQDLETKAYYTVQLYYSDLRFVEGEYGITEKEYMKKVAEQTKGQVVRFCFSLQKNDGLEIEWKDSQRYDVRFYNFQSANSINFKGLEQEMIPAENQFKQKPYNNGAINLNIAKYGKEGKKLRKFNTDILGKKHHLSYEKEPKNIIK

SEQ ID NO: 31 - protein, 1323 aa, synthetic construct
  REGION 1..1323: note = nAPG05586_inlaidK922_LPG50148+V81S (LPG20024)
MYSIGLALGISSVGWSVIDEETGKIVDLGVRLFSAKNSEKNLERRTSRGARRLIRRKTNRLKDAKKLLEAIGFYEDKALKNVCPYQLRVKGLTEGLTKGELYKVVLHIVKKRGISYLDEDDAEAAKESQDYKEQVRKNAQLLTKYTPGQIQLQRLKENNRVKTGINGQGHYQLNVFKVSAYADELATILKTQQALYPNELTDDWIALFVQPGIAENAGLIYRKRPYYHGPGNEANNSPYGRWSDFQKTGQPAANIFDKLIGKDFQGELRASGLSLSAQQYNLLNDLTNLKIDGEVSLSPEQKEFILTELMTKEFARFGVNDIAKLLGVKKEQLSGWRLDKKGKPEIHTLKGYRNWRKIFAEAGIDLATLPTETIDCLAKVLTLNTEREGVENTLAFELPELAEPVKSLVLDHYKELSQSISTQAWHRFSLKTLHLLIPELIKSTSEQNTLLEQFQLKAGVRKRYSDYKKLPTKEVLAEIYNPTVNKTVSQAFKVMDALLEKYGKDQIHYITVEMPRDDNEEEERKRIKELQTKNSQRKNDSQQYFLQKSGWSQEKFQATIHKNRRFLAKLLYYFEQDGVCAYTGNPISPELLVSDSTEIDHIIPISISLDDSINNKVLVLSHANQVKGQQTPYDARMAGAFNKINGKFSNWDEYQKWVESRPFSRKKVNNLLETRNIFDSEQVQKFLSRNLNDTRYASRLVLNTLQSFFENQDTIVRVVNGSFTHTLRKKWGADLDKTRETHHHHAVDATLCAVTPFVKVSRYHYAVNEETGEKFMREIDVETGEILDEIPYREYKKAKHYERKTYQVKWSNFREQLKPITIHPKIKFSHQVDRKANRKLSDATIYSVREKTEVKTLKSGKEKITTDEYTIGKIKDIYTVDGWEAFKKKQDKLLMKEFDEKTYELLVTIAATTPDFQEVEEKSGGSNPEFTHEYWMRHALTLARRARDEGEVPVGAVLVLNNQVIGEGWNRAIGLHDPTAHAEIMALRQGGLVLQNYRLIDTTLYSTFEPCVMCSGAMVHSRIGTLVFGVRNSKRGAAGSLMNVLNYPGMNHQVKTIGGVLAPECSGLLCDFYRMPRQVFNQQKAELKSINDGGSNGKVKRVKRSPFAVYCEENGIPAIRKYAKKNNGPVIRSLKYYDGKLNKHINITKDEKGRPVEQTKNGRKVTLQSLKPYRYDIYQDLETKAYYTVQLYYSDLRFVEGEYGITEKEYMKKVAEQTKGQVVRFCFSLQKNDGLEIEWKDSQRYDVRFYNFQSANSINFKGLEQEMIPAENQFKQKPYNNGAINLNIAKYGKEGKKLRKFNTDILGKKHHLSYEKEPKNIIK

SEQ ID NO: 32 - protein, 1323 aa, synthetic construct
  REGION 1..1323: note = nAPG05586_inlaidG1109_LPG50148+V81S (LPG20025)
MYSIGLALGISSVGWSVIDEETGKIVDLGVRLFSAKNSEKNLERRTSRGARRLIRRKTNRLKDAKKLLEAIGFYEDKALKNVCPYQLRVKGLTEGLTKGELYKVVLHIVKKRGISYLDEDDAEAAKESQDYKEQVRKNAQLLTKYTPGQIQLQRLKENNRVKTGINGQGHYQLNVFKVSAYADELATILKTQQALYPNELTDDWIALFVQPGIAENAGLIYRKRPYYHGPGNEANNSPYGRWSDFQKTGQPAANIFDKLIGKDFQGELRASGLSLSAQQYNLLNDLTNLKIDGEVSLSPEQKEFILTELMTKEFARFGVNDIAKLLGVKKEQLSGWRLDKKGKPEIHTLKGYRNWRKIFAEAGIDLATLPTETIDCLAKVLTLNTEREGVENTLAFELPELAEPVKSLVLDHYKELSQSISTQAWHRFSLKTLHLLIPELIKSTSEQNTLLEQFQLKAGVRKRYSDYKKLPTKEVLAEIYNPTVNKTVSQAFKVMDALLEKYGKDQIHYITVEMPRDDNEEEERKRIKELQTKNSQRKNDSQQYFLQKSGWSQEKFQATIHKNRRFLAKLLYYFEQDGVCAYTGNPISPELLVSDSTEIDHIIPISISLDDSINNKVLVLSHANQVKGQQTPYDARMAGAFNKINGKFSNWDEYQKWVESRPFSRKKVNNLLETRNIFDSEQVQKFLSRNLNDTRYASRLVLNTLQSFFENQDTIVRVVNGSFTHTLRKKWGADLDKTRETHHHHAVDATLCAVTPFVKVSRYHYAVNEETGEKFMREIDVETGEILDEIPYREYKKAKHYERKTYQVKWSNFREQLKPITIHPKIKFSHQVDRKANRKLSDATIYSVREKTEVKTLKSGKEKITTDEYTIGKIKDIYTVDGWEAFKKKQDKLLMKEFDEKTYELLVTIAATTPDFQEVEEKNGKVKRVKRSPFAVYCEENGIPAIRKYAKKNNGPVIRSLKYYDGKLNKHINITKDEKGRPVEQTKNGRKVTLQSLKPYRYDIYQDLETKAYYTVQLYYSDLRFVEGEYGITEKEYMKKVAEQTKGQVVRFCFSLQKNDGLEIEWKDSQRYDVRFYNFQSANSINFKGLEQEMIPAENQFKQKPYNNGSGGSNPEFTHEYWMRHALTLARRARDEGEVPVGAVLVLNNQVIGEGWNRAIGLHDPTAHAEIMALRQGGLVLQNYRLIDTTLYSTFEPCVMCSGAMVHSRIGTLVFGVRNSKRGAAGSLMNVLNYPGMNHQVKTIGGVLAPECSGLLCDFYRMPRQVFNQQKAELKSINDGGSAINLNIAKYGKEGKKLRKFNTDILGKKHHLSYEKEPKNIIK

SEQ ID NO: 33 - protein, 1252 aa, synthetic construct
  REGION 1..1252: note = LPG50148+V81S_nAPG01604_parental
MSNPEFTHEYWMRHALTLARRARDEGEVPVGAVLVLNNQVIGEGWNRAIGLHDPTAHAEIMALRQGGLVLQNYRLIDTTLYSTFEPCVMCSGAMVHSRIGTLVFGVRNSKRGAAGSLMNVLNYPGMNHQVKTIGGVLAPECSGLLCDFYRMPRQVFNQQKAELKSINDSGGSSGGSSGSETPGTSESATPESSGGSSGGSMVTKYILGLAIGITSVGYGIINYEDKTIIDAGVRLFPEANVENNEGRRSKRGARRLKRRRIHRLDRIKQLLSEYNLVDLDNIPQSPSPYEIRVKGLREELSKDELVIALLHIAKRRGIHNVEAVDETQDEGNELSTKEQLAKNNNLLKDKYVCELLLERLKDGKVRGEKNRFKTTDIIKEVKQLLETQKEAHQLDDDFINRYIDLIETRREYFEGPGKGSPFGWGGDLKKWYETLMGHCTYFPNELRSVKYSYSADLFNALNDLNNLVIQREGNSKLEYHEKYHIIENVFKQKKKPTLKQIANEIGVSPDDIKGFRINKSGKETFTEFKLYHDLKKVLIDQSILENVQLLDQIAEILTIYQDKESIINELNQLSEIINEQDKESISNLSGYNGTHRLSLKCINLVIEELWHTSRNQMEIFTYLNIKPKKIDLAKTNKIPKNMIDEFILSPVVKRTFGQAINVINKVIEKYGVPEDIIIELARESNSKDKQKFINSLQKKNETTRKRINEIIGQYGNQNAKRLVEKIRLHDEQEGKCLYSLESIPLEDLINNPQYYEVDHIIPRSVSFDNSYQNKVLVKQTENSKKSNRTPYQYFNSGETKLSYNQFKQHVLNLSKSKDRISKKKKEYLLEERDINKYEVQKEFINRNLVDTRYATRELTNYLKAYFSANDMDVKVKTINGSFTDYLRKVWKFKKERNHGYKHHAEDALIIANADFLFKENKKLKKANAILEQPSLDNGKSDATVENDNEYVETFSIPKQVNDIKEFRDFKFSHRVDKKPNRQLINDTLYSTRKIENHTFIVSPITNIYSKDNDELKKKFNKNPEKFLMYQHDPKTFEKLEVIMKQYANEKNPLAKYHEETGEYLTKYSKKNNGPIVKTIKVLGDKVGKHLDVTHKYKYSNSKIVKKTINPYRFDVYLTDKGYKFITISYLDVLKKDNYYYILKEKYEELKIKKSISDTDQFIGSFYYNDLIKINDQIFKVVGVNNDLLNRIELDLLDISYKEYCKINNIKTNRIIKGITKKITNIEKFSTDVLGNLYKAHSNHPQLIFKQRD

SEQ ID NO: 34 - protein, 1227 aa, synthetic construct
  REGION 1..1227: note = nAPG01604_inlaidG597_LPG50148+V81S+A137V (LPG20027)
MVTKYILGLAIGITSVGYGIINYEDKTIIDAGVRLFPEANVENNEGRRSKRGARRLKRRRIHRLDRIKQLLSEYNLVDLDNIPQSPSPYEIRVKGLREELSKDELVIALLHIAKRRGIHNVEAVDETQDEGNELSTKEQLAKNNNLLKDKYVCELLLERLKDGKVRGEKNRFKTTDIIKEVKQLLETQKEAHQLDDDFINRYIDLIETRREYFEGPGKGSPFGWGGDLKKWYETLMGHCTYFPNELRSVKYSYSADLFNALNDLNNLVIQREGNSKLEYHEKYHIIENVFKQKKKPTLKQIANEIGVSPDDIKGFRINKSGKETFTEFKLYHDLKKVLIDQSILENVQLLDQIAEILTIYQDKESIINELNQLSEIINEQDKESISNLSGYNGTHRLSLKCINLVIEELWHTSRNQMEIFTYLNIKPKKIDLAKTNKIPKNMIDEFILSPVVKRTFGQAINVINKVIEKYGVPEDIIIELARESNSKDKQKFINSLQKKNETTRKRINEIIGQYGNQNAKRLVEKIRLHDEQEGKCLYSLESIPLEDLINNPQYYEVDHIIPRSVSFDNSYQNKVLVKQTENSKKSNRTPYQYFNSGSSGSNPEFTHEYWMRHALTLARRARDEGEVPVGAVLVLNNQVIGEGWNRAIGLHDPTAHAEIMALRQGGLVLQNYRLIDTTLYSTFEPCVMCSGAMVHSRIGTLVFGVRNSKRGAAGSLMNVLNYPGMNHQVKTIGGVLVPECSGLLCDFYRMPRQVFNQQKAELKSINDGSSGGETKLSYNQFKQHVLNLSKSKDRISKKKKEYLLEERDINKYEVQKEFINRNLVDTRYATRELTNYLKAYFSANDMDVKVKTINGSFTDYLRKVWKFKKERNHGYKHHAEDALIIANADFLFKENKKLKKANAILEQPSLDNGKSDATVENDNEYVETFSIPKQVNDIKEFRDFKFSHRVDKKPNRQLINDTLYSTRKIENHTFIVSPITNIYSKDNDELKKKFNKNPEKFLMYQHDPKTFEKLEVIMKQYANEKNPLAKYHEETGEYLTKYSKKNNGPIVKTIKVLGDKVGKHLDVTHKYKYSNSKIVKKTINPYRFDVYLTDKGYKFITISYLDVLKKDNYYYILKEKYEELKIKKSISDTDQFIGSFYYNDLIKINDQIFKVVGVNNDLLNRIELDLLDISYKEYCKINNIKTNRIIKGITKKITNIEKFSTDVLGNLYKAHSNHPQLIFKQRD

SEQ ID NO: 35 - protein, 1227 aa, synthetic construct
  REGION 1..1227: note = nAPG01604_inlaidS631_LPG50148+V81S+A137V (LPG20028)
MVTKYILGLAIGITSVGYGIINYEDKTIIDAGVRLFPEANVENNEGRRSKRGARRLKRRRIHRLDRIKQLLSEYNLVDLDNIPQSPSPYEIRVKGLREELSKDELVIALLHIAKRRGIHNVEAVDETQDEGNELSTKEQLAKNNNLLKDKYVCELLLERLKDGKVRGEKNRFKTTDIIKEVKQLLETQKEAHQLDDDFINRYIDLIETRREYFEGPGKGSPFGWGGDLKKWYETLMGHCTYFPNELRSVKYSYSADLFNALNDLNNLVIQREGNSKLEYHEKYHIIENVFKQKKKPTLKQIANEIGVSPDDIKGFRINKSGKETFTEFKLYHDLKKVLIDQSILENVQLLDQIAEILTIYQDKESIINELNQLSEIINEQDKESISNLSGYNGTHRLSLKCINLVIEELWHTSRNQMEIFTYLNIKPKKIDLAKTNKIPKNMIDEFILSPVVKRTFGQAINVINKVIEKYGVPEDIIIELARESNSKDKQKFINSLQKKNETTRKRINEIIGQYGNQNAKRLVEKIRLHDEQEGKCLYSLESIPLEDLINNPQYYEVDHIIPRSVSFDNSYQNKVLVKQTENSKKSNRTPYQYFNSGETKLSYNQFKQHVLNLSKSKDRISKKKKEYLLEEGSSGSNPEFTHEYWMRHALTLARRARDEGEVPVGAVLVLNNQVIGEGWNRAIGLHDPTAHAEIMALRQGGLVLQNYRLIDTTLYSTFEPCVMCSGAMVHSRIGTLVFGVRNSKRGAAGSLMNVLNYPGMNHQVKTIGGVLVPECSGLLCDFYRMPRQVFNQQKAELKSINDGSSGRDINKYEVQKEFINRNLVDTRYATRELTNYLKAYFSANDMDVKVKTINGSFTDYLRKVWKFKKERNHGYKHHAEDALIIANADFLFKENKKLKKANAILEQPSLDNGKSDATVENDNEYVETFSIPKQVNDIKEFRDFKFSHRVDKKPNRQLINDTLYSTRKIENHTFIVSPITNIYSKDNDELKKKFNKNPEKFLMYQHDPKTFEKLEVIMKQYANEKNPLAKYHEETGEYLTKYSKKNNGPIVKTIKVLGDKVGKHLDVTHKYKYSNSKIVKKTINPYRFDVYLTDKGYKFITISYLDVLKKDNYYYILKEKYEELKIKKSISDTDQFIGSFYYNDLIKINDQIFKVVGVNNDLLNRIELDLLDISYKEYCKINNIKTNRIIKGITKKITNIEKFSTDVLGNLYKAHSNHPQLIFKQRD

SEQ ID NO: 36 - protein, 1227 aa, synthetic construct
  REGION 1..1227: note = nAPG01604_inlaidK725_LPG50148+V81S+A137V (LPG20029)
MVTKYILGLAIGITSVGYGIINYEDKTIIDAGVRLFPEANVENNEGRRSKRGARRLKRRRIHRLDRIKQLLSEYNLVDLDNIPQSPSPYEIRVKGLREELSKDELVIALLHIAKRRGIHNVEAVDETQDEGNELSTKEQLAKNNNLLKDKYVCELLLERLKDGKVRGEKNRFKTTDIIKEVKQLLETQKEAHQLDDDFINRYIDLIETRREYFEGPGKGSPFGWGGDLKKWYETLMGHCTYFPNELRSVKYSYSADLFNALNDLNNLVIQREGNSKLEYHEKYHIIENVFKQKKKPTLKQIANEIGVSPDDIKGFRINKSGKETFTEFKLYHDLKKVLIDQSILENVQLLDQIAEILTIYQDKESIINELNQLSEIINEQDKESISNLSGYNGTHRLSLKCINLVIEELWHTSRNQMEIFTYLNIKPKKIDLAKTNKIPKNMIDEFILSPVVKRTFGQAINVINKVIEKYGVPEDIIIELARESNSKDKQKFINSLQKKNETTRKRINEIIGQYGNQNAKRLVEKIRLHDEQEGKCLYSLESIPLEDLINNPQYYEVDHIIPRSVSFDNSYQNKVLVKQTENSKKSNRTPYQYFNSGETKLSYNQFKQHVLNLSKSKDRISKKKKEYLLEERDINKYEVQKEFINRNLVDTRYATRELTNYLKAYFSANDMDVKVKTINGSFTDYLRKVWKFKKERNHGYKHHAEDALIIANADFLFKENKKLKKGSSGSNPEFTHEYWMRHALTLARRARDEGEVPVGAVLVLNNQVIGEGWNRAIGLHDPTAHAEIMALRQGGLVLQNYRLIDTTLYSTFEPCVMCSGAMVHSRIGTLVFGVRNSKRGAAGSLMNVLNYPGMNHQVKTIGGVLVPECSGLLCDFYRMPRQVFNQQKAELKSINDGSSGANAILEQPSLDNGKSDATVENDNEYVETFSIPKQVNDIKEFRDFKFSHRVDKKPNRQLINDTLYSTRKIENHTFIVSPITNIYSKDNDELKKKFNKNPEKFLMYQHDPKTFEKLEVIMKQYANEKNPLAKYHEETGEYLTKYSKKNNGPIVKTIKVLGDKVGKHLDVTHKYKYSNSKIVKKTINPYRFDVYLTDKGYKFITISYLDVLKKDNYYYILKEKYEELKIKKSISDTDQFIGSFYYNDLIKINDQIFKVVGVNNDLLNRIELDLLDISYKEYCKINNIKTNRIIKGITKKITNIEKFSTDVLGNLYKAHSNHPQLIFKQRD

SEQ ID NO: 37 - protein, 1227 aa, synthetic construct
  REGION 1..1227: note = nAPG01604_inlaidK739_LPG50148+V81S+A137V (LPG20030)
MVTKYILGLAIGITSVGYGIINYEDKTIIDAGVRLFPEANVENNEGRRSKRGARRLKRRRIHRLDRIKQLLSEYNLVDLDNIPQSPSPYEIRVKGLREELSKDELVIALLHIAKRRGIHNVEAVDETQDEGNELSTKEQLAKNNNLLKDKYVCELLLERLKDGKVRGEKNRFKTTDIIKEVKQLLETQKEAHQLDDDFINRYIDLIETRREYFEGPGKGSPFGWGGDLKKWYETLMGHCTYFPNELRSVKYSYSADLFNALNDLNNLVIQREGNSKLEYHEKYHIIENVFKQKKKPTLKQIANEIGVSPDDIKGFRINKSGKETFTEFKLYHDLKKVLIDQSILENVQLLDQIAEILTIYQDKESIINELNQLSEIINEQDKESISNLSGYNGTHRLSLKCINLVIEELWHTSRNQMEIFTYLNIKPKKIDLAKTNKIPKNMIDEFILSPVVKRTFGQAINVINKVIEKYGVPEDIIIELARESNSKDKQKFINSLQKKNETTRKRINEIIGQYGNQNAKRLVEKIRLHDEQEGKCLYSLESIPLEDLINNPQYYEVDHIIPRSVSFDNSYQNKVLVKQTENSKKSNRTPYQYFNSGETKLSYNQFKQHVLNLSKSKDRISKKKKEYLLEERDINKYEVQKEFINRNLVDTRYATRELTNYLKAYFSANDMDVKVKTINGSFTDYLRKVWKFKKERNHGYKHHAEDALIIANADFLFKENKKLKKANAILEQPSLDNGKGSSGSNPEFTHEYWMRHALTLARRARDEGEVPVGAVLVLNNQVIGEGWNRAIGLHDPTAHAEIMALRQGGLVLQNYRLIDTTLYSTFEPCVMCSGAMVHSRIGTLVFGVRNSKRGAAGSLMNVLNYPGMNHQVKTIGGVLVPECSGLLCDFYRMPRQVFNQQKAELKSINDGSSGSDATVENDNEYVETFSIPKQVNDIKEFRDFKFSHRVDKKPNRQLINDTLYSTRKIENHTFIVSPITNIYSKDNDELKKKFNKNPEKFLMYQHDPKTFEKLEVIMKQYANEKNPLAKYHEETGEYLTKYSKKNNGPIVKTIKVLGDKVGKHLDVTHKYKYSNSKIVKKTINPYRFDVYLTDKGYKFITISYLDVLKKDNYYYILKEKYEELKIKKSISDTDQFIGSFYYNDLIKINDQIFKVVGVNNDLLNRIELDLLDISYKEYCKINNIKTNRIIKGITKKITNIEKFSTDVLGNLYKAHSNHPQLIFKQRD

SEQ ID NO: 38 - protein, 1227 aa, synthetic construct
  REGION 1..1227: note = nAPG01604_inlaidV744_LPG50148+V81S+A137V (LPG20031)
MVTKYILGLAIGITSVGYGIINYEDKTIIDAGVRLFPEANVENNEGRRSKRGARRLKRRRIHRLDRIKQLLSEYNLVDLDNIPQSPSPYEIRVKGLREELSKDELVIALLHIAKRRGIHNVEAVDETQDEGNELSTKEQLAKNNNLLKDKYVCELLLERLKDGKVRGEKNRFKTTDIIKEVKQLLETQKEAHQLDDDFINRYIDLIETRREYFEGPGKGSPFGWGGDLKKWYETLMGHCTYFPNELRSVKYSYSADLFNALNDLNNLVIQREGNSKLEYHEKYHIIENVFKQKKKPTLKQIANEIGVSPDDIKGFRINKSGKETFTEFKLYHDLKKVLIDQSILENVQLLDQIAEILTIYQDKESIINELNQLSEIINEQDKESISNLSGYNGTHRLSLKCINLVIEELWHTSRNQMEIFTYLNIKPKKIDLAKTNKIPKNMIDEFILSPVVKRTFGQAINVINKVIEKYGVPEDIIIELARESNSKDKQKFINSLQKKNETTRKRINEIIGQYGNQNAKRLVEKIRLHDEQEGKCLYSLESIPLEDLINNPQYYEVDHIIPRSVSFDNSYQNKVLVKQTENSKKSNRTPYQYFNSGETKLSYNQFKQHVLNLSKSKDRISKKKKEYLLEERDINKYEVQKEFINRNLVDTRYATRELTNYLKAYFSANDMDVKVKTINGSFTDYLRKVWKFKKERNHGYKHHAEDALIIANADFLFKENKKLKKANAILEQPSLDNGKSDATVGSSGSNPEFTHEYWMRHALTLARRARDEGEVPVGAVLVLNNQVIGEGWNRAIGLHDPTAHAEIMALRQGGLVLQNYRLIDTTLYSTFEPCVMCSGAMVHSRIGTLVFGVRNSKRGAAGSLMNVLNYPGMNHQVKTIGGVLVPECSGLLCDFYRMPRQVFNQQKAELKSINDGSSGENDNEYVETFSIPKQVNDIKEFRDFKFSHRVDKKPNRQLINDTLYSTRKIENHTFIVSPITNIYSKDNDELKKKFNKNPEKFLMYQHDPKTFEKLEVIMKQYANEKNPLAKYHEETGEYLTKYSKKNNGPIVKTIKVLGDKVGKHLDVTHKYKYSNSKIVKKTINPYRFDVYLTDKGYKFITISYLDVLKKDNYYYILKEKYEELKIKKSISDTDQFIGSFYYNDLIKINDQIFKVVGVNNDLLNRIELDLLDISYKEYCKINNIKTNRIIKGITKKITNIEKFSTDVLGNLYKAHSNHPQLIFKQRD

SEQ ID NO: 39 - protein, 1330 aa, synthetic construct
  REGION 1..1330: note = LPG50148+V81S_nLPG10145_parental
MSNPEFTHEYWMRHALTLARRARDEGEVPVGAVLVLNNQVIGEGWNRAIGLHDPTAHAEIMALRQGGLVLQNYRLIDTTLYSTFEPCVMCSGAMVHSRIGTLVFGVRNSKRGAAGSLMNVLNYPGMNHQVKTIGGVLAPECSGLLCDFYRMPRQVFNQQKAELKSINDSGGSSGGSSGSETPGTSESATPESSGGSSGGSMSKVAKNMTRVNLGFAIGIASVGWSVLDNQTGKILETGVSIFPSGSASRNEERRSFRQSRRLIRRKKARICDMDHLLKKNGFPFPGNTGANPYEIRVKGLTEKLSREELAIALHHLVKRRGISYDLKDVEDESAGGTNYQESIAVNQRLLKKETPAEIQLARLTECGKVRGQVKSLGEDNTATTLLNVFPNAAYQEEMVKLLKKQQEFYGEIDDPFMETAIGILSRKREYFIGPGSEKSRTDYGIYRTDGTTLKNLFEILVGKDKIFPDQYRAAGNSYTAQLYNLLNDLNNLEVDATEDGKLTTAHKEQIIEELTTTTGNVNMLKLIAKVAGTSPAGIKKYRVDREGKPEFHSLAIYRRLRKKLGEAGFEINEWPPEFFDDYGPIVTLNTESGELRKWLAEEGSRKYDFLTEPVIEAILANKSAFDSVGKNKWHRFSLKTMQLLIPELLHTFKEQMTILAEMGLLHENKKDYGDQNKVDVKYLTENLYNPVVRKSVKQAMDIFNALFEKYANIDYVVIEMPRDDAEDELEQKKQFQKFQLKNEKEKDASLKEFQELAGVSDLQLEAQLRKRKKLRQKIRMWYQQRGKCPYSGKTIAAVDLFHQDNQFEIDHIIPLSVSFDDGQNNKVLCYSEMNQEKGKQTPYAFMSRGGGQGFSALQAYVKSNNRLENAKKRNLLFTEDINDLEVRKRFIARNLVDTRYASRIVLNELQQFVRSKELDTRVTVIRGKLTSKLRDRWRLNKSRETHHHHAVDAAVIAVSPMLKMWEKNAEIIPLKVDENTVDLKSGEIITDQEYAAQMYELPYARFLEQMPELHKKIKFHHQVDKKMNRKVSDATLYSTRKAKVGTDKKEQEYVIGKIKDIYQFDQYKKFKKLYDGDKSKFLMQRLDPQTFAKLEKIMEDYPAKIDATQPNGTIKLVDISPFELYRREHGPVTKYAKKNNGPAIKSLKFYDSIVGSSVKITPKNAKGKEVILKSLKPWRTDVYYNHEKEQYEIMGIKYADLKFKGDNYGITKARYQEIKEEEGVSEESEFLFSLYRGDRIQVSNGEDKIDLLFLSRSNPAKKGYVELKPIDRNQLNGKEVVSVYGAASGGRLKKQFVKKNHTLHKVNTDILGNPFYIKKESDQPKNILDL

SEQ ID NO: 40 - protein, 1303 aa, synthetic construct
  REGION 1..1303: note = nLPG10145_inlaidG347_LPG50148+V81S (LPG20032)
MSKVAKNMTRVNLGFAIGIASVGWSVLDNQTGKILETGVSIFPSGSASRNEERRSFRQSRRLIRRKKARICDMDHLLKKNGFPFPGNTGANPYEIRVKGLTEKLSREELAIALHHLVKRRGISYDLKDVEDESAGGTNYQESIAVNQRLLKKETPAEIQLARLTECGKVRGQVKSLGEDNTATTLLNVFPNAAYQEEMVKLLKKQQEFYGEIDDPFMETAIGILSRKREYFIGPGSEKSRTDYGIYRTDGTTLKNLFEILVGKDKIFPDQYRAAGNSYTAQLYNLLNDLNNLEVDATEDGKLTTAHKEQIIEELTTTTGNVNMLKLIAKVAGTSPAGIKKYRVDREGSGGSNPEFTHEYWMRHALTLARRARDEGEVPVGAVLVLNNQVIGEGWNRAIGLHDPTAHAEIMALRQGGLVLQNYRLIDTTLYSTFEPCVMCSGAMVHSRIGTLVFGVRNSKRGAAGSLMNVLNYPGMNHQVKTIGGVLAPECSGLLCDFYRMPRQVFNQQKAELKSINDGGSKPEFHSLAIYRRLRKKLGEAGFEINEWPPEFFDDYGPIVTLNTESGELRKWLAEEGSRKYDFLTEPVIEAILANKSAFDSVGKNKWHRFSLKTMQLLIPELLHTFKEQMTILAEMGLLHENKKDYGDQNKVDVKYLTENLYNPVVRKSVKQAMDIFNALFEKYANIDYVVIEMPRDDAEDELEQKKQFQKFQLKNEKEKDASLKEFQELAGVSDLQLEAQLRKRKKLRQKIRMWYQQRGKCPYSGKTIAAVDLFHQDNQFEIDHIIPLSVSFDDGQNNKVLCYSEMNQEKGKQTPYAFMSRGGGQGFSALQAYVKSNNRLENAKKRNLLFTEDINDLEVRKRFIARNLVDTRYASRIVLNELQQFVRSKELDTRVTVIRGKLTSKLRDRWRLNKSRETHHHHAVDAAVIAVSPMLKMWEKNAEIIPLKVDENTVDLKSGEIITDQEYAAQMYELPYARFLEQMPELHKKIKFHHQVDKKMNRKVSDATLYSTRKAKVGTDKKEQEYVIGKIKDIYQFDQYKKFKKLYDGDKSKFLMQRLDPQTFAKLEKIMEDYPAKIDATQPNGTIKLVDISPFELYRREHGPVTKYAKKNNGPAIKSLKFYDSIVGSSVKITPKNAKGKEVILKSLKPWRTDVYYNHEKEQYEIMGIKYADLKFKGDNYGITKARYQEIKEEEGVSEESEFLFSLYRGDRIQVSNGEDKIDLLFLSRSNPAKKGYVELKPIDRNQLNGKEVVSVYGAASGGRLKKQFVKKNHTLHKVNTDILGNPFYIKKESDQPKNILDL

SEQ ID NO: 41 - protein, 1303 aa, synthetic construct
  REGION 1..1303: note = nLPG10145_inlaidD524_LPG50148+V81S (LPG20033)
MSKVAKNMTRVNLGFAIGIASVGWSVLDNQTGKILETGVSIFPSGSASRNEERRSFRQSRRLIRRKKARICDMDHLLKKNGFPFPGNTGANPYEIRVKGLTEKLSREELAIALHHLVKRRGISYDLKDVEDESAGGTNYQESIAVNQRLLKKETPAEIQLARLTECGKVRGQVKSLGEDNTATTLLNVFPNAAYQEEMVKLLKKQQEFYGEIDDPFMETAIGILSRKREYFIGPGSEKSRTDYGIYRTDGTTLKNLFEILVGKDKIFPDQYRAAGNSYTAQLYNLLNDLNNLEVDATEDGKLTTAHKEQIIEELTTTTGNVNMLKLIAKVAGTSPAGIKKYRVDREGKPEFHSLAIYRRLRKKLGEAGFEINEWPPEFFDDYGPIVTLNTESGELRKWLAEEGSRKYDFLTEPVIEAILANKSAFDSVGKNKWHRFSLKTMQLLIPELLHTFKEQMTILAEMGLLHENKKDYGDQNKVDVKYLTENLYNPVVRKSVKQAMDIFNALFEKYANIDYVVIEMPRDDSGGSNPEFTHEYWMRHALTLARRARDEGEVPVGAVLVLNNQVIGEGWNRAIGLHDPTAHAEIMALRQGGLVLQNYRLIDTTLYSTFEPCVMCSGAMVHSRIGTLVFGVRNSKRGAAGSLMNVLNYPGMNHQVKTIGGVLAPECSGLLCDFYRMPRQVFNQQKAELKSINDGGSAEDELEQKKQFQKFQLKNEKEKDASLKEFQELAGVSDLQLEAQLRKRKKLRQKIRMWYQQRGKCPYSGKTIAAVDLFHQDNQFEIDHIIPLSVSFDDGQNNKVLCYSEMNQEKGKQTPYAFMSRGGGQGFSALQAYVKSNNRLENAKKRNLLFTEDINDLEVRKRFIARNLVDTRYASRIVLNELQQFVRSKELDTRVTVIRGKLTSKLRDRWRLNKSRETHHHHAVDAAVIAVSPMLKMWEKNAEIIPLKVDENTVDLKSGEIITDQEYAAQMYELPYARFLEQMPELHKKIKFHHQVDKKMNRKVSDATLYSTRKAKVGTDKKEQEYVIGKIKDIYQFDQYKKFKKLYDGDKSKFLMQRLDPQTFAKLEKIMEDYPAKIDATQPNGTIKLVDISPFELYRREHGPVTKYAKKNNGPAIKSLKFYDSIVGSSVKITPKNAKGKEVILKSLKPWRTDVYYNHEKEQYEIMGIKYADLKFKGDNYGITKARYQEIKEEEGVSEESEFLFSLYRGDRIQVSNGEDKIDLLFLSRSNPAKKGYVELKPIDRNQLNGKEVVSVYGAASGGRLKKQFVKKNHTLHKVNTDILGNPFYIKKESDQPKNILDL

SEQ ID NO: 42 - protein, 1303 aa, synthetic construct
  REGION 1..1303: note = nLPG10145_inlaidQ640_LPG50148+V81S (LPG20034)
MSKVAKNMTRVNLGFAIGIASVGWSVLDNQTGKILETGVSIFPSGSASRNEERRSFRQSRRLIRRKKARICDMDHLLKKNGFPFPGNTGANPYEIRVKGLTEKLSREELAIALHHLVKRRGISYDLKDVEDESAGGTNYQESIAVNQRLLKKETPAEIQLARLTECGKVRGQVKSLGEDNTATTLLNVFPNAAYQEEMVKLLKKQQEFYGEIDDPFMETAIGILSRKREYFIGPGSEKSRTDYGIYRTDGTTLKNLFEILVGKDKIFPDQYRAAGNSYTAQLYNLLNDLNNLEVDATEDGKLTTAHKEQIIEELTTTTGNVNMLKLIAKVAGTSPAGIKKYRVDREGKPEFHSLAIYRRLRKKLGEAGFEINEWPPEFFDDYGPIVTLNTESGELRKWLAEEGSRKYDFLTEPVIEAILANKSAFDSVGKNKWHRFSLKTMQLLIPELLHTFKEQMTILAEMGLLHENKKDYGDQNKVDVKYLTENLYNPVVRKSVKQAMDIFNALFEKYANIDYVVIEMPRDDAEDELEQKKQFQKFQLKNEKEKDASLKEFQELAGVSDLQLEAQLRKRKKLRQKIRMWYQQRGKCPYSGKTIAAVDLFHQDNQFEIDHIIPLSVSFDDGQNNKVLCYSEMNQEKGKQSGGSNPEFTHEYWMRHALTLARRARDEGEVPVGAVLVLNNQVIGEGWNRAIGLHDPTAHAEIMALRQGGLVLQNYRLIDTTLYSTFEPCVMCSGAMVHSRIGTLVFGVRNSKRGAAGSLMNVLNYPGMNHQVKTIGGVLAPECSGLLCDFYRMPRQVFNQQKAELKSINDGGSTPYAFMSRGGGQGFSALQAYVKSNNRLENAKKRNLLFTEDINDLEVRKRFIARNLVDTRYASRIVLNELQQFVRSKELDTRVTVIRGKLTSKLRDRWRLNKSRETHHHHAVDAAVIAVSPMLKMWEKNAEIIPLKVDENTVDLKSGEIITDQEYAAQMYELPYARFLEQMPELHKKIKFHHQVDKKMNRKVSDATLYSTRKAKVGTDKKEQEYVIGKIKDIYQFDQYKKFKKLYDGDKSKFLMQRLDPQTFAKLEKIMEDYPAKIDATQPNGTIKLVDISPFELYRREHGPVTKYAKKNNGPAIKSLKFYDSIVGSSVKITPKNAKGKEVILKSLKPWRTDVYYNHEKEQYEIMGIKYADLKFKGDNYGITKARYQEIKEEEGVSEESEFLFSLYRGDRIQVSNGEDKIDLLFLSRSNPAKKGYVELKPIDRNQLNGKEVVSVYGAASGGRLKKQFVKKNHTLHKVNTDILGNPFYIKKESDQPKNILDL

SEQ ID NO: 43 - protein, 1303 aa, synthetic construct
  REGION 1..1303: note = nLPG10145_inlaidR666_LPG50148+V81S (LPG20035)
MSKVAKNMTRVNLGFAIGIASVGWSVLDNQTGKILETGVSIFPSGSASRNEERRSFRQSRRLIRRKKARICDMDHLLKKNGFPFPGNTGANPYEIRVKGLTEKLSREELAIALHHLVKRRGISYDLKDVEDESAGGTNYQESIAVNQRLLKKETPAEIQLARLTECGKVRGQVKSLGEDNTATTLLNVFPNAAYQEEMVKLLKKQQEFYGEIDDPFMETAIGILSRKREYFIGPGSEKSRTDYGIYRTDGTTLKNLFEILVGKDKIFPDQYRAAGNSYTAQLYNLLNDLNNLEVDATEDGKLTTAHKEQIIEELTTTTGNVNMLKLIAKVAGTSPAGIKKYRVDREGKPEFHSLAIYRRLRKKLGEAGFEINEWPPEFFDDYGPIVTLNTESGELRKWLAEEGSRKYDFLTEPVIEAILANKSAFDSVGKNKWHRFSLKTMQLLIPELLHTFKEQMTILAEMGLLHENKKDYGDQNKVDVKYLTENLYNPVVRKSVKQAMDIFNALFEKYANIDYVVIEMPRDDAEDELEQKKQFQKFQLKNEKEKDASLKEFQELAGVSDLQLEAQLRKRKKLRQKIRMWYQQRGKCPYSGKTIAAVDLFHQDNQFEIDHIIPLSVSFDDGQNNKVLCYSEMNQEKGKQTPYAFMSRGGGQGFSALQAYVKSNNRSGGSNPEFTHEYWMRHALTLARRARDEGEVPVGAVLVLNNQVIGEGWNRAIGLHDPTAHAEIMALRQGGLVLQNYRLIDTTLYSTFEPCVMCSGAMVHSRIGTLVFGVRNSKRGAAGSLMNVLNYPGMNHQVKTIGGVLAPECSGLLCDFYRMPRQVFNQQKAELKSINDGGSLENAKKRNLLFTEDINDLEVRKRFIARNLVDTRYASRIVLNELQQFVRSKELDTRVTVIRGKLTSKLRDRWRLNKSRETHHHHAVDAAVIAVSPMLKMWEKNAEIIPLKVDENTVDLKSGEIITDQEYAAQMYELPYARFLEQMPELHKKIKFHHQVDKKMNRKVSDATLYSTRKAKVGTDKKEQEYVIGKIKDIYQFDQYKKFKKLYDGDKSKFLMQRLDPQTFAKLEKIMEDYPAKIDATQPNGTIKLVDISPFELYRREHGPVTKYAKKNNGPAIKSLKFYDSIVGSSVKITPKNAKGKEVILKSLKPWRTDVYYNHEKEQYEIMGIKYADLKFKGDNYGITKARYQEIKEEEGVSEESEFLFSLYRGDRIQVSNGEDKIDLLFLSRSNPAKKGYVELKPIDRNQLNGKEVVSVYGAASGGRLKKQFVKKNHTLHKVNTDILGNPFYIKKESDQPKNILDL

SEQ ID NO: 44 - protein, 1303 aa, synthetic construct
  REGION 1..1303: note = nLPG10145_inlaidD680_LPG50148+V81S (LPG20036)
MSKVAKNMTRVNLGFAIGIASVGWSVLDNQTGKILETGVSIFPSGSASRNEERRSFRQSRRLIRRKKARICDMDHLLKKNGFPFPGNTGANPYEIRVKGLTEKLSREELAIALHHLVKRRGISYDLKDVEDESAGGTNYQESIAVNQRLLKKETPAEIQLARLTECGKVRGQVKSLGEDNTATTLLNVFPNAAYQEEMVKLLKKQQEFYGEIDDPFMETAIGILSRKREYFIGPGSEKSRTDYGIYRTDGTTLKNLFEILVGKDKIFPDQYRAAGNSYTAQLYNLLNDLNNLEVDATEDGKLTTAHKEQIIEELTTTTGNVNMLKLIAKVAGTSPAGIKKYRVDREGKPEFHSLAIYRRLRKKLGEAGFEINEWPPEFFDDYGPIVTLNTESGELRKWLAEEGSRKYDFLTEPVIEAILANKSAFDSVGKNKWHRFSLKTMQLLIPELLHTFKEQMTILAEMGLLHENKKDYGDQNKVDVKYLTENLYNPVVRKSVKQAMDIFNALFEKYANIDYVVIEMPRDDAEDELEQKKQFQKFQLKNEKEKDASLKEFQELAGVSDLQLEAQLRKRKKLRQKIRMWYQQRGKCPYSGKTIAAVDLFHQDNQFEIDHIIPLSVSFDDGQNNKVLCYSEMNQEKGKQTPYAFMSRGGGQGFSALQAYVKSNNRLENAKKRNLLFTEDSGGSNPEFTHEYWMRHALTLARRARDEGEVPVGAVLVLNNQVIGEGWNRAIGLHDPTAHAEIMALRQGGLVLQNYRLIDTTLYSTFEPCVMCSGAMVHSRIGTLVFGVRNSKRGAAGSLMNVLNYPGMNHQVKTIGGVLAPECSGLLCDFYRMPRQVFNQQKAELKSINDGGSINDLEVRKRFIARNLVDTRYASRIVLNELQQFVRSKELDTRVTVIRGKLTSKLRDRWRLNKSRETHHHHAVDAAVIAVSPMLKMWEKNAEIIPLKVDENTVDLKSGEIITDQEYAAQMYELPYARFLEQMPELHKKIKFHHQVDKKMNRKVSDATLYSTRKAKVGTDKKEQEYVIGKIKDIYQFDQYKKFKKLYDGDKSKFLMQRLDPQTFAKLEKIMEDYPAKIDATQPNGTIKLVDISPFELYRREHGPVTKYAKKNNGPAIKSLKFYDSIVGSSVKITPKNAKGKEVILKSLKPWRTDVYYNHEKEQYEIMGIKYADLKFKGDNYGITKARYQEIKEEEGVSEESEFLFSLYRGDRIQVSNGEDKIDLLFLSRSNPAKKGYVELKPIDRNQLNGKEVVSVYGAASGGRLKKQFVKKNHTLHKVNTDILGNPFYIKKESDQPKNILDL

SEQ ID NO: 45 - protein, 1303 aa, synthetic construct
  REGION 1..1303: note = nLPG10145_inlaidN740_LPG50148+V81S (LPG20037)
MSKVAKNMTRVNLGFAIGIASVGWSVLDNQTGKILETGVSIFPSGSASRNEERRSFRQSRRLIRRKKARICDMDHLLKKNGFPFPGNTGANPYEIRVKGLTEKLSREELAIALHHLVKRRGISYDLKDVEDESAGGTNYQESIAVNQRLLKKETPAEIQLARLTECGKVRGQVKSLGEDNTATTLLNVFPNAAYQEEMVKLLKKQQEFYGEIDDPFMETAIGILSRKREYFIGPGSEKSRTDYGIYRTDGTTLKNLFEILVGKDKIFPDQYRAAGNSYTAQLYNLLNDLNNLEVDATEDGKLTTAHKEQIIEELTTTTGNVNMLKLIAKVAGTSPAGIKKYRVDREGKPEFHSLAIYRRLRKKLGEAGFEINEWPPEFFDDYGPIVTLNTESGELRKWLAEEGSRKYDFLTEPVIEAILANKSAFDSVGKNKWHRFSLKTMQLLIPELLHTFKEQMTILAEMGLLHENKKDYGDQNKVDVKYLTENLYNPVVRKSVKQAMDIFNALFEKYANIDYVVIEMPRDDAEDELEQKKQFQKFQLKNEKEKDASLKEFQELAGVSDLQLEAQLRKRKKLRQKIRMWYQQRGKCPYSGKTIAAVDLFHQDNQFEIDHIIPLSVSFDDGQNNKVLCYSEMNQEKGKQTPYAFMSRGGGQGFSALQAYVKSNNRLENAKKRNLLFTEDINDLEVRKRFIARNLVDTRYASRIVLNELQQFVRSKELDTRVTVIRGKLTSKLRDRWRLNSGGSNPEFTHEYWMRHALTLARRARDEGEVPVGAVLVLNNQVIGEGWNRAIGLHDPTAHAEIMALRQGGLVLQNYRLIDTTLYSTFEPCVMCSGAMVHSRIGTLVFGVRNSKRGAAGSLMNVLNYPGMNHQVKTIGGVLAPECSGLLCDFYRMPRQVFNQQKAELKSINDGGSKSRETHHHHAVDAAVIAVSPMLKMWEKNAEIIPLKVDENTVDLKSGEIITDQEYAAQMYELPYARFLEQMPELHKKIKFHHQVDKKMNRKVSDATLYSTRKAKVGTDKKEQEYVIGKIKDIYQFDQYKKFKKLYDGDKSKFLMQRLDPQTFAKLEKIMEDYPAKIDATQPNGTIKLVDISPFELYRREHGPVTKYAKKNNGPAIKSLKFYDSIVGSSVKITPKNAKGKEVILKSLKPWRTDVYYNHEKEQYEIMGIKYADLKFKGDNYGITKARYQEIKEEEGVSEESEFLFSLYRGDRIQVSNGEDKIDLLFLSRSNPAKKGYVELKPIDRNQLNGKEVVSVYGAASGGRLKKQFVKKNHTLHKVNTDILGNPFYIKKESDQPKNILDL

SEQ ID NO: 46 - protein, 1303 aa, synthetic construct
  REGION 1..1303: note = nLPG10145_inlaidS785_LPG50148+V81S (LPG20038)
MSKVAKNMTRVNLGFAIGIASVGWSVLDNQTGKILETGVSIFPSGSASRNEERRSFRQSRRLIRRKKARICDMDHLLKKNGFPFPGNTGANPYEIRVKGLTEKLSREELAIALHHLVKRRGISYDLKDVEDESAGGTNYQESIAVNQRLLKKETPAEIQLARLTECGKVRGQVKSLGEDNTATTLLNVFPNAAYQEEMVKLLKKQQEFYGEIDDPFMETAIGILSRKREYFIGPGSEKSRTDYGIYRTDGTTLKNLFEILVGKDKIFPDQYRAAGNSYTAQLYNLLNDLNNLEVDATEDGKLTTAHKEQIIEELTTTTGNVNMLKLIAKVAGTSPAGIKKYRVDREGKPEFHSLAIYRRLRKKLGEAGFEINEWPPEFFDDYGPIVTLNTESGELRKWLAEEGSRKYDFLTEPVIEAILANKSAFDSVGKNKWHRFSLKTMQLLIPELLHTFKEQMTILAEMGLLHENKKDYGDQNKVDVKYLTENLYNPVVRKSVKQAMDIFNALFEKYANIDYVVIEMPRDDAEDELEQKKQFQKFQLKNEKEKDASLKEFQELAGVSDLQLEAQLRKRKKLRQKIRMWYQQRGKCPYSGKTIAAVDLFHQDNQFEIDHIIPLSVSFDDGQNNKVLCYSEMNQEKGKQTPYAFMSRGGGQGFSALQAYVKSNNRLENAKKRNLLFTEDINDLEVRKRFIARNLVDTRYASRIVLNELQQFVRSKELDTRVTVIRGKLTSKLRDRWRLNKSRETHHHHAVDAAVIAVSPMLKMWEKNAEIIPLKVDENTVDLKSSGGSNPEFTHEYWMRHALTLARRARDEGEVPVGAVLVLNNQVIGEGWNRAIGLHDPTAHAEIMALRQGGLVLQNYRLIDTTLYSTFEPCVMCSGAMVHSRIGTLVFGVRNSKRGAAGSLMNVLNYPGMNHQVKTIGGVLAPECSGLLCDFYRMPRQVFNQQKAELKSINDGGSGEIITDQEYAAQMYELPYARFLEQMPELHKKIKFHHQVDKKMNRKVSDATLYSTRKAKVGTDKKEQEYVIGKIKDIYQFDQYKKFKKLYDGDKSKFLMQRLDPQTFAKLEKIMEDYPAKIDATQPNGTIKLVDISPFELYRREHGPVTKYAKKNNGPAIKSLKFYDSIVGSSVKITPKNAKGKEVILKSLKPWRTDVYYNHEKEQYEIMGIKYADLKFKGDNYGITKARYQEIKEEEGVSEESEFLFSLYRGDRIQVSNGEDKIDLLFLSRSNPAKKGYVELKPIDRNQLNGKEVVSVYGAASGGRLKKQFVKKNHTLHKVNTDILGNPFYIKKESDQPKNILDL

SEQ ID NO: 47 - protein, 1303 aa, synthetic construct
  REGION 1..1303: note = nLPG10145_inlaidP910_LPG50148+V81S (LPG20039)
MSKVAKNMTRVNLGFAIGIASVGWSVLDNQTGKILETGVSIFPSGSASRNEERRSFRQSRRLIRRKKARICDMDHLLKKNGFPFPGNTGANPYEIRVKGLTEKLSREELAIALHHLVKRRGISYDLKDVEDESAGGTNYQESIAVNQRLLKKETPAEIQLARLTECGKVRGQVKSLGEDNTATTLLNVFPNAAYQEEMVKLLKKQQEFYGEIDDPFMETAIGILSRKREYFIGPGSEKSRTDYGIYRTDGTTLKNLFEILVGKDKIFPDQYRAAGNSYTAQLYNLLNDLNNLEVDATEDGKLTTAHKEQIIEELTTTTGNVNMLKLIAKVAGTSPAGIKKYRVDREGKPEFHSLAIYRRLRKKLGEAGFEINEWPPEFFDDYGPIVTLNTESGELRKWLAEEGSRKYDFLTEPVIEAILANKSAFDSVGKNKWHRFSLKTMQLLIPELLHTFKEQMTILAEMGLLHENKKDYGDQNKVDVKYLTENLYNPVVRKSVKQAMDIFNALFEKYANIDYVVIEMPRDDAEDELEQKKQFQKFQLKNEKEKDASLKEFQELAGVSDLQLEAQLRKRKKLRQKIRMWYQQRGKCPYSGKTIAAVDLFHQDNQFEIDHIIPLSVSFDDGQNNKVLCYSEMNQEKGKQTPYAFMSRGGGQGFSALQAYVKSNNRLENAKKRNLLFTEDINDLEVRKRFIARNLVDTRYASRIVLNELQQFVRSKELDTRVTVIRGKLTSKLRDRWRLNKSRETHHHHAVDAAVIAVSPMLKMWEKNAEIIPLKVDENTVDLKSGEIITDQEYAAQMYELPYARFLEQMPELHKKIKFHHQVDKKMNRKVSDATLYSTRKAKVGTDKKEQEYVIGKIKDIYQFDQYKKFKKLYDGDKSKFLMQRLDPQTFAKLEKIMEDYPAKIDATQPSGGSNPEFTHEYWMRHALTLARRARDEGEVPVGAVLVLNNQVIGEGWNRAIGLHDPTAHAEIMALRQGGLVLQNYRLIDTTLYSTFEPCVMCSGAMVHSRIGTLVFGVRNSKRGAAGSLMNVLNYPGMNHQVKTIGGVLAPECSGLLCDFYRMPRQVFNQQKAELKSINDGGSNGTIKLVDISPFELYRREHGPVTKYAKKNNGPAIKSLKFYDSIVGSSVKITPKNAKGKEVILKSLKPWRTDVYYNHEKEQYEIMGIKYADLKFKGDNYGITKARYQEIKEEEGVSEESEFLFSLYRGDRIQVSNGEDKIDLLFLSRSNPAKKGYVELKPIDRNQLNGKEVVSVYGAASGGRLKKQFVKKNHTLHKVNTDILGNPFYIKKESDQPKNILDL

SEQ ID NO: 48 - protein, 1303 aa, synthetic construct
  REGION 1..1303: note = nLPG10145_inlaidG1077_LPG50148+V81S (LPG20040)
MSKVAKNMTRVNLGFAIGIASVGWSVLDNQTGKILETGVSIFPSGSASRNEERRSFRQSRRLIRRKKARICDMDHLLKKNGFPFPGNTGANPYEIRVKGLTEKLSREELAIALHHLVKRRGISYDLKDVEDESAGGTNYQESIAVNQRLLKKETPAEIQLARLTECGKVRGQVKSLGEDNTATTLLNVFPNAAYQEEMVKLLKKQQEFYGEIDDPFMETAIGILSRKREYFIGPGSEKSRTDYGIYRTDGTTLKNLFEILVGKDKIFPDQYRAAGNSYTAQLYNLLNDLNNLEVDATEDGKLTTAHKEQIIEELTTTTGNVNMLKLIAKVAGTSPAGIKKYRVDREGKPEFHSLAIYRRLRKKLGEAGFEINEWPPEFFDDYGPIVTLNTESGELRKWLAEEGSRKYDFLTEPVIEAILANKSAFDSVGKNKWHRFSLKTMQLLIPELLHTFKEQMTILAEMGLLHENKKDYGDQNKVDVKYLTENLYNPVVRKSVKQAMDIFNALFEKYANIDYVVIEMPRDDAEDELEQKKQFQKFQLKNEKEKDASLKEFQELAGVSDLQLEAQLRKRKKLRQKIRMWYQQRGKCPYSGKTIAAVDLFHQDNQFEIDHIIPLSVSFDDGQNNKVLCYSEMNQEKGKQTPYAFMSRGGGQGFSALQAYVKSNNRLENAKKRNLLFTEDINDLEVRKRFIARNLVDTRYASRIVLNELQQFVRSKELDTRVTVIRGKLTSKLRDRWRLNKSRETHHHHAVDAAVIAVSPMLKMWEKNAEIIPLKVDENTVDLKSGEIITDQEYAAQMYELPYARFLEQMPELHKKIKFHHQVDKKMNRKVSDATLYSTRKAKVGTDKKEQEYVIGKIKDIYQFDQYKKFKKLYDGDKSKFLMQRLDPQTFAKLEKIMEDYPAKIDATQPNGTIKLVDISPFELYRREHGPVTKYAKKNNGPAIKSLKFYDSIVGSSVKITPKNAKGKEVILKSLKPWRTDVYYNHEKEQYEIMGIKYADLKFKGDNYGITKARYQEIKEEEGVSEESEFLFSLYRGDRIQVSNGEDKIDLLFLSRSNPAKKGYVELKPIDRNQLNGSGGSNPEFTHEYWMRHALTLARRARDEGEVPVGAVLVLNNQVIGEGWNRAIGLHDPTAHAEIMALRQGGLVLQNYRLIDTTLYSTFEPCVMCSGAMVHSRIGTLVFGVRNSKRGAAGSLMNVLNYPGMNHQVKTIGGVLAPECSGLLCDFYRMPRQVFNQQKAELKSINDGGSKEVVSVYGAASGGRLKKQFVKKNHTLHKVNTDILGNPFYIKKESDQPKNILDL

SEQ ID NO: 49 - protein, 1071 aa, synthetic construct
  REGION 1..1071: note = nAPG07433.1 (D11A)
MRELDYRIGLAIGTNSIGWGVIELSWNKDRERYEKVRIVDQGVRMFDRAEMPKTGASLAEPRRIARSSRRRLNRKSQRKKNIRNLLVQHGVITQEELDSLYPLSKKSMDIWGIRLDGLDRLLNHFEWARLLIHLAQRRGFKSNRKSELKDTETGKVLSSIQLNEKRLSLYRTVGEMWMKDPDFSKYDRKRNSPNEYVFSVSRAELEKEIVTLFAAQRRFQSPYASKDLQETYLQIWTHQLPFASGNAILNKVGYCSLLKGKERRIPKATYTFQYFSALDQVNRTRLGPDFQPFTKEQREIILNNMFQRTDYYKKKTIPEVTYYDIRKWLELDETIQFKGLNYDPNEELKKIEKKPFINLKAFYEINKVVANYSERTNETFSTLDYDGIGYALTVYKTDKDIRSYLKSSHNLPKRCYDDQLIEELLSLSYTKFGHLSLKAINHVLSIMQKGNTYKEAVDQLGYDTSGLKKEKRSKFLPPISDEITNPIVKRALTQARKVVNAIIRRHGSPHSVHIELARELSKNHDERTKIVSAQDENYKKNKGAISILSEHGILNPTGYDIVRYKLWKEQGERCAYSLKEIPADTFFNELKKERNGAPILEVDHILPYSQSFIDSYHNKVLVYSDENRKKGNRIPYTYFLETNKDWEAFERYVRSNKFFSKKKREYLLKRAYLPRESELIKERHLNDTRYASTFLKNFIEQNLQFKEAEDNPRKRRVQTVNGVITAHFRKRWGLEKDRQETYLHHAMDAIIVACTDHHMVTRVTEYYQIKESNKSVKKPYFPMPWEGFRDELLSHLASQPIAKKISEELKAGYQSLDYIFVSRMPKRSITGAAHKQTIMRKGGIDKKGKTIIIERLHLKDIKFDENGDFKMVGKEQDMATYEAIKQRYLEHGKNSKKAFETPLYKPSKKGTGNLIKRVKVEGQAKSFVREVNGGVAQNGDLVRVDLFEKDDKYYMVPIYVPDTVCSELPKKVVASSKGYEQWLTLDNSFTFKFSLYPYDLVRLVKGDEDRFLYFGTLDIDSDRLNFKDVNKPSKKNEYRYSLKTIEDLEKYEVGVLGDLRLVRKETRRNFH

SEQ ID NO: 50 - protein, 1150 aa, synthetic construct
  REGION 1..1150: note = nAPG05586 (D11A)
MYSIGLALGISSVGWSVIDEETGKIVDLGVRLFSAKNSEKNLERRTSRGARRLIRRKTNRLKDAKKLLEAIGFYEDKALKNVCPYQLRVKGLTEGLTKGELYKVVLHIVKKRGISYLDEDDAEAAKESQDYKEQVRKNAQLLTKYTPGQIQLQRLKENNRVKTGINGQGHYQLNVFKVSAYADELATILKTQQALYPNELTDDWIALFVQPGIAENAGLIYRKRPYYHGPGNEANNSPYGRWSDFQKTGQPAANIFDKLIGKDFQGELRASGLSLSAQQYNLLNDLTNLKIDGEVSLSPEQKEFILTELMTKEFARFGVNDIAKLLGVKKEQLSGWRLDKKGKPEIHTLKGYRNWRKIFAEAGIDLATLPTETIDCLAKVLTLNTEREGVENTLAFELPELAEPVKSLVLDHYKELSQSISTQAWHRFSLKTLHLLIPELIKSTSEQNTLLEQFQLKAGVRKRYSDYKKLPTKEVLAEIYNPTVNKTVSQAFKVMDALLEKYGKDQIHYITVEMPRDDNEEEERKRIKELQTKNSQRKNDSQQYFLQKSGWSQEKFQATIHKNRRFLAKLLYYFEQDGVCAYTGNPISPELLVSDSTEIDHIIPISISLDDSINNKVLVLSHANQVKGQQTPYDARMAGAFNKINGKFSNWDEYQKWVESRPFSRKKVNNLLETRNIFDSEQVQKFLSRNLNDTRYASRLVLNTLQSFFENQDTIVRVVNGSFTHTLRKKWGADLDKTRETHHHHAVDATLCAVTPFVKVSRYHYAVNEETGEKFMREIDVETGEILDEIPYREYKKAKHYERKTYQVKWSNFREQLKPITIHPKIKFSHQVDRKANRKLSDATIYSVREKTEVKTLKSGKEKITTDEYTIGKIKDIYTVDGWEAFKKKQDKLLMKEFDEKTYELLVTIAATTPDFQEVEEKNGKVKRVKRSPFAVYCEENGIPAIRKYAKKNNGPVIRSLKYYDGKLNKHINITKDEKGRPVEQTKNGRKVTLQSLKPYRYDIYQDLETKAYYTVQLYYSDLRFVEGEYGITEKEYMKKVAEQTKGQVVRFCFSLQKNDGLEIEWKDSQRYDVRFYNFQSANSINFKGLEQEMIPAENQFKQKPYNNGAINLNIAKYGKEGKKLRKFNTDILGKKHHLSYEKEPKNIIK

SEQ ID NO: 51 - protein, 1052 aa, synthetic construct
  REGION 1..1052: note = nAPG01604 (D11A)
MVTKYILGLAIGITSVGYGIINYEDKTIIDAGVRLFPEANVENNEGRRSKRGARRLKRRRIHRLDRIKQLLSEYNLVDLDNIPQSPSPYEIRVKGLREELSKDELVIALLHIAKRRGIHNVEAVDETQDEGNELSTKEQLAKNNNLLKDKYVCELLLERLKDGKVRGEKNRFKTTDIIKEVKQLLETQKEAHQLDDDFINRYIDLIETRREYFEGPGKGSPFGWGGDLKKWYETLMGHCTYFPNELRSVKYSYSADLFNALNDLNNLVIQREGNSKLEYHEKYHIIENVFKQKKKPTLKQIANEIGVSPDDIKGFRINKSGKETFTEFKLYHDLKKVLIDQSILENVQLLDQIAEILTIYQDKESIINELNQLSEIINEQDKESISNLSGYNGTHRLSLKCINLVIEELWHTSRNQMEIFTYLNIKPKKIDLAKTNKIPKNMIDEFILSPVVKRTFGQAINVINKVIEKYGVPEDIIIELARESNSKDKQKFINSLQKKNETTRKRINEIIGQYGNQNAKRLVEKIRLHDEQEGKCLYSLESIPLEDLINNPQYYEVDHIIPRSVSFDNSYQNKVLVKQTENSKKSNRTPYQYFNSGETKLSYNQFKQHVLNLSKSKDRISKKKKEYLLEERDINKYEVQKEFINRNLVDTRYATRELTNYLKAYFSANDMDVKVKTINGSFTDYLRKVWKFKKERNHGYKHHAEDALIIANADFLFKENKKLKKANAILEQPSLDNGKSDATVENDNEYVETFSIPKQVNDIKEFRDFKFSHRVDKKPNRQLINDTLYSTRKIENHTFIVSPITNIYSKDNDELKKKFNKNPEKFLMYQHDPKTFEKLEVIMKQYANEKNPLAKYHEETGEYLTKYSKKNNGPIVKTIKVLGDKVGKHLDVTHKYKYSNSKIVKKTINPYRFDVYLTDKGYKFITISYLDVLKKDNYYYILKEKYEELKIKKSISDTDQFIGSFYYNDLIKINDQIFKVVGVNNDLLNRIELDLLDISYKEYCKINNIKTNRIIKGITKKITNIEKFSTDVLGNLYKAHSNHPQLIFKQRD

SEQ ID NO: 52 - protein, 1130 aa, synthetic construct
  REGION 1..1130: note = nLPG10145 (D11A)
MSKVAKNMTRVNLGFAIGIASVGWSVLDNQTGKILETGVSIFPSGSASRNEERRSFRQSRRLIRRKKARICDMDHLLKKNGFPFPGNTGANPYEIRVKGLTEKLSREELAIALHHLVKRRGISYDLKDVEDESAGGTNYQESIAVNQRLLKKETPAEIQLARLTECGKVRGQVKSLGEDNTATTLLNVFPNAAYQEEMVKLLKKQQEFYGEIDDPFMETAIGILSRKREYFIGPGSEKSRTDYGIYRTDGTTLKNLFEILVGKDKIFPDQYRAAGNSYTAQLYNLLNDLNNLEVDATEDGKLTTAHKEQIIEELTTTTGNVNMLKLIAKVAGTSPAGIKKYRVDREGKPEFHSLAIYRRLRKKLGEAGFEINEWPPEFFDDYGPIVTLNTESGELRKWLAEEGSRKYDFLTEPVIEAILANKSAFDSVGKNKWHRFSLKTMQLLIPELLHTFKEQMTILAEMGLLHENKKDYGDQNKVDVKYLTENLYNPVVRKSVKQAMDIFNALFEKYANIDYVVIEMPRDDAEDELEQKKQFQKFQLKNEKEKDASLKEFQELAGVSDLQLEAQLRKRKKLRQKIRMWYQQRGKCPYSGKTIAAVDLFHQDNQFEIDHIIPLSVSFDDGQNNKVLCYSEMNQEKGKQTPYAFMSRGGGQGFSALQAYVKSNNRLENAKKRNLLFTEDINDLEVRKRFIARNLVDTRYASRIVLNELQQFVRSKELDTRVTVIRGKLTSKLRDRWRLNKSRETHHHHAVDAAVIAVSPMLKMWEKNAEIIPLKVDENTVDLKSGEIITDQEYAAQMYELPYARFLEQMPELHKKIKFHHQVDKKMNRKVSDATLYSTRKAKVGTDKKEQEYVIGKIKDIYQFDQYKKFKKLYDGDKSKFLMQRLDPQTFAKLEKIMEDYPAKIDATQPNGTIKLVDISPFELYRREHGPVTKYAKKNNGPAIKSLKFYDSIVGSSVKITPKNAKGKEVILKSLKPWRTDVYYNHEKEQYEIMGIKYADLKFKGDNYGITKARYQEIKEEEGVSEESEFLFSLYRGDRIQVSNGEDKIDLLFLSRSNPAKKGYVELKPIDRNQLNGKEVVSVYGAASGGRLKKQFVKKNHTLHKVNTDILGNPFYIKKESDQPKNILDL

SEQ ID NO: 53 - protein, 1150 aa, synthetic construct
MYSIGLDLGISSVGWSVIDEETGKIVDLGVRLFSAKNSEKNLERRTSRGARRLIRRKTNRLKDAKKLLEAIGFYEDKALKNVCPYQLRVKGLTEGLTKGELYKVVLHIVKKRGISYLDEDDAEAAKESQDYKEQVRKNAQLLTKYTPGQIQLQRLKENNRVKTGINGQGHYQLNVFKVSAYADELATILKTQQALYPNELTDDWIALFVQPGIAENAGLIYRKRPYYHGPGNEANNSPYGRWSDFQKTGQPAANIFDKLIGKDFQGELRASGLSLSAQQYNLLNDLTNLKIDGEVSLSPEQKEFILTELMTKEFARFGVNDIAKLLGVKKEQLSGWRLDKKGKPEIHTLKGYRNWRKIFAEAGIDLATLPTETIDCLAKVLTLNTEREGVENTLAFELPELAEPVKSLVLDHYKELSQSISTQAWHRFSLKTLHLLIPELIKSTSEQNTLLEQFQLKAGVRKRYSDYKKLPTKEVLAEIYNPTVNKTVSQAFKVMDALLEKYGKDQIHYITVEMPRDDNEEEERKRIKELQTKNSQRKNDSQQYFLQKSGWSQEKFQATIHKNRRFLAKLLYYFEQDGVCAYTGNPISPELLVSDSTEIDAIIPISISLDDSINNKVLVLSHANQVKGQQTPYDARMAGAFNKINGKFSNWDEYQKWVESRPFSRKKVNNLLETRNIFDSEQVQKFLSRNLNDTRYASRLVLNTLQSFFENQDTIVRVVNGSFTHTLRKKWGADLDKTRETHHHHAVDATLCAVTPFVKVSRYHYAVNEETGEKFMREIDVETGEILDEIPYREYKKAKHYERKTYQVKWSNFREQLKPITIHPKIKFSHQVDRKANRKLSDATIYSVREKTEVKTLKSGKEKITTDEYTIGKIKDIYTVDGWEAFKKKQDKLLMKEFDEKTYELLVTIAATTPDFQEVEEKNGKVKRVKRSPFAVYCEENGIPAIRKYAKKNNGPVIRSLKYYDGKLNKHINITKDEKGRPVEQTKNGRKVTLQSLKPYRYDIYQDLETKAYYTVQLYYSDLRFVEGEYGITEKEYMKKVAEQTKGQVVRFCFSLQKNDGLEIEWKDSQRYDVRFYNFQSANSINFKGLEQEMIPAENQFKQKPYNNGAINLNIAKYGKEGKKLRKFNTDILGKKHHLSYEKEPKNIIK

SEQ ID NO: 54 - protein, 1052 aa, synthetic construct
MVTKYILGLDIGITSVGYGIINYEDKTIIDAGVRLFPEANVENNEGRRSKRGARRLKRRRIHRLDRIKQLLSEYNLVDLDNIPQSPSPYEIRVKGLREELSKDELVIALLHIAKRRGIHNVEAVDETQDEGNELSTKEQLAKNNNLLKDKYVCELLLERLKDGKVRGEKNRFKTTDIIKEVKQLLETQKEAHQLDDDFINRYIDLIETRREYFEGPGKGSPFGWGGDLKKWYETLMGHCTYFPNELRSVKYSYSADLFNALNDLNNLVIQREGNSKLEYHEKYHIIENVFKQKKKPTLKQIANEIGVSPDDIKGFRINKSGKETFTEFKLYHDLKKVLIDQSILENVQLLDQIAEILTIYQDKESIINELNQLSEIINEQDKESISNLSGYNGTHRLSLKCINLVIEELWHTSRNQMEIFTYLNIKPKKIDLAKTNKIPKNMIDEFILSPVVKRTFGQAINVINKVIEKYGVPEDIIIELARESNSKDKQKFINSLQKKNETTRKRINEIIGQYGNQNAKRLVEKIRLHDEQEGKCLYSLESIPLEDLINNPQYYEVDAIIPRSVSFDNSYQNKVLVKQTENSKKSNRTPYQYFNSGETKLSYNQFKQHVLNLSKSKDRISKKKKEYLLEERDINKYEVQKEFINRNLVDTRYATRELTNYLKAYFSANDMDVKVKTINGSFTDYLRKVWKFKKERNHGYKHHAEDALIIANADFLFKENKKLKKANAILEQPSLDNGKSDATVENDNEYVETFSIPKQVNDIKEFRDFKFSHRVDKKPNRQLINDTLYSTRKIENHTFIVSPITNIYSKDNDELKKKFNKNPEKFLMYQHDPKTFEKLEVIMKQYANEKNPLAKYHEETGEYLTKYSKKNNGPIVKTIKVLGDKVGKHLDVTHKYKYSNSKIVKKTINPYRFDVYLTDKGYKFITISYLDVLKKDNYYYILKEKYEELKIKKSISDTDQFIGSFYYNDLIKINDQIFKVVGVNNDLLNRIELDLLDISYKEYCKINNIKTNRIIKGITKKITNIEKFSTDVLGNLYKAHSNHPQLIFKQRD

SEQ ID NO: 55 - protein, 1130 aa, synthetic construct
  REGION 1..1130: note = nLPG10145 (H840A)
MSKVAKNMTRVNLGFDIGIASVGWSVLDNQTGKILETGVSIFPSGSASRNEERRSFRQSRRLIRRKKARICDMDHLLKKNGFPFPGNTGANPYEIRVKGLTEKLSREELAIALHHLVKRRGISYDLKDVEDESAGGTNYQESIAVNQRLLKKETPAEIQLARLTECGKVRGQVKSLGEDNTATTLLNVFPNAAYQEEMVKLLKKQQEFYGEIDDPFMETAIGILSRKREYFIGPGSEKSRTDYGIYRTDGTTLKNLFEILVGKDKIFPDQYRAAGNSYTAQLYNLLNDLNNLEVDATEDGKLTTAHKEQIIEELTTTTGNVNMLKLIAKVAGTSPAGIKKYRVDREGKPEFHSLAIYRRLRKKLGEAGFEINEWPPEFFDDYGPIVTLNTESGELRKWLAEEGSRKYDFLTEPVIEAILANKSAFDSVGKNKWHRFSLKTMQLLIPELLHTFKEQMTILAEMGLLHENKKDYGDQNKVDVKYLTENLYNPVVRKSVKQAMDIFNALFEKYANIDYVVIEMPRDDAEDELEQKKQFQKFQLKNEKEKDASLKEFQELAGVSDLQLEAQLRKRKKLRQKIRMWYQQRGKCPYSGKTIAAVDLFHQDNQFEIDAIIPLSVSFDDGQNNKVLCYSEMNQEKGKQTPYAFMSRGGGQGFSALQAYVKSNNRLENAKKRNLLFTEDINDLEVRKRFIARNLVDTRYASRIVLNELQQFVRSKELDTRVTVIRGKLTSKLRDRWRLNKSRETHHHHAVDAAVIAVSPMLKMWEKNAEIIPLKVDENTVDLKSGEIITDQEYAAQMYELPYARFLEQMPELHKKIKFHHQVDKKMNRKVSDATLYSTRKAKVGTDKKEQEYVIGKIKDIYQFDQYKKFKKLYDGDKSKFLMQRLDPQTFAKLEKIMEDYPAKIDATQPNGTIKLVDISPFELYRREHGPVTKYAKKNNGPAIKSLKFYDSIVGSSVKITPKNAKGKEVILKSLKPWRTDVYYNHEKEQYEIMGIKYADLKFKGDNYGITKARYQEIKEEEGVSEESEFLFSLYRGDRIQVSNGEDKIDLLFLSRSNPAKKGYVELKPIDRNQLNGKEVVSVYGAASGGRLKKQFVKKNHTLHKVNTDILGNPFYIKKESDQPKNILDL

SEQ ID NO: 56 - protein, 1071 aa, synthetic construct
MRELDYRIGLDIGTNSIGWGVIELSWNKDRERYEKVRIVDQGVRMFDRAEMPKTGASLAEPRRIARSSRRRLNRKSQRKKNIRNLLVQHGVITQEELDSLYPLSKKSMDIWGIRLDGLDRLLNHFEWARLLIHLAQRRGFKSNRKSELKDTETGKVLSSIQLNEKRLSLYRTVGEMWMKDPDFSKYDRKRNSPNEYVFSVSRAELEKEIVTLFAAQRRFQSPYASKDLQETYLQIWTHQLPFASGNAILNKVGYCSLLKGKERRIPKATYTFQYFSALDQVNRTRLGPDFQPFTKEQREIILNNMFQRTDYYKKKTIPEVTYYDIRKWLELDETIQFKGLNYDPNEELKKIEKKPFINLKAFYEINKVVANYSERTNETFSTLDYDGIGYALTVYKTDKDIRSYLKSSHNLPKRCYDDQLIEELLSLSYTKFGHLSLKAINHVLSIMQKGNTYKEAVDQLGYDTSGLKKEKRSKFLPPISDEITNPIVKRALTQARKVVNAIIRRHGSPHSVHIELARELSKNHDERTKIVSAQDENYKKNKGAISILSEHGILNPTGYDIVRYKLWKEQGERCAYSLKEIPADTFFNELKKERNGAPILEVDAILPYSQSFIDSYHNKVLVYSDENRKKGNRIPYTYFLETNKDWEAFERYVRSNKFFSKKKREYLLKRAYLPRESELIKERHLNDTRYASTFLKNFIEQNLQFKEAEDNPRKRRVQTVNGVITAHFRKRWGLEKDRQETYLHHAMDAIIVACTDHHMVTRVTEYYQIKESNKSVKKPYFPMPWEGFRDELLSHLASQPIAKKISEELKAGYQSLDYIFVSRMPKRSITGAAHKQTIMRKGGIDKKGKTIIIERLHLKDIKFDENGDFKMVGKEQDMATYEAIKQRYLEHGKNSKKAFETPLYKPSKKGTGNLIKRVKVEGQAKSFVREVNGGVAQNGDLVRVDLFEKDDKYYMVPIYVPDTVCSELPKKVVASSKGYEQWLTLDNSFTFKFSLYPYDLVRLVKGDEDRFLYFGTLDIDSDRLNFKDVNKPSKKNEYRYSLKTIEDLEKYEVGVLGDLRLVRKETRRNFH

SEQ ID NO: 57 - protein, 1072 aa, Bacillus sp.
  REGION 1..1072: note = APG08290.1
MSELDYRIGLDIGTNSIGWGVIELFWNKDRERYEKVRIVDKGVRMFDKAEIPNKGASLAEPRRIARSSRRRLNRKSQRKKEIRNLLVQHGMITQEELDLLYPLSKKSIDIWDIRLDGLDRLLNHLEWARLLIHLAQRRGFKSNRKSELKDAETGKVLSSIQVNEKRLFLYRTVGEMWIKDAEFSKYDRRRNSPNEYVFSVSRADLEKEIVTLFEAQRKFQSSYASKNLQETYLQIWAHQLPFASGNAILNKVGYCSLLKGKERRIPKATYTFQYFSALDQVNRTRLGPDFQPFTQEQKEIILDKMFQRTDYYKKKTIPEVSYYDIRKWLELDETIQFKGLNYDPNEELKKIEKKPFINLKAFYEIKKVVANYAERTNEAFSTLDYDAIAYALTVYKTDKDIRSYLKKSNNLSKRCYDDQLIEELFTLSYTKFGHLSFKAINHVLPIMQEGRTYQEAIHQLGYDTTNLKKENRSMFLPLIPDEITNPIVKRAITQARKVVNAIIRRYGSPNSVHIELARELSKSHDERKKIMTAHDENYKKNKGAISILIENGILNPTGYDIVRYKLWKEQGERCAYSLKEIPPDTFFNELKKERNGSPILEVDHILPYSQSFIDSYHNKVLVYSDENRNKGNRIPYTYFLETNKDWEAFERYVRSNKLFSKKKREYLLKKTYLPRESELIKERHLNDTRYASTFLKNFIEQNLQFKEVEVNLRKKRVQTVNGVITAHLRKRWGLEKNRQETYLHHAMDAIIVACTDHHMVTRITEYYQIKESNKSVKKPYFPMPWEGFRDELLSHLASQPIAKKISEELKAGYQSSDYIFVSRMPKRSVTGAAHDQTIRRKGGIDKKGKTIIIKRVRLKDIKFDENGDFKMVGKEQDLATYEAIKQRYLEHRKNSKKAFETPLYKPSKKGTGNLIKRVKIEGQTKAFVREVNGGVAQNSDLVRVDLFEKDDKYYMVPIYVPDTVCSELPKKVVKSGKGYEQWLTLDNSFTFKSSLYPYDLVRLVKGNEDRFLYFGTLDIDSDRLNFKDVNKPSKQNEYRYSLKTIENLEKYEVGVLGDLRLVKQETRRIFNR

SEQ ID NO: 58 - protein, 1337 aa, Enterococcus sp.
  REGION 1..1337: note = APG05459.1
MKKDYVIGLDIGTNSVGWAVMTEDYQLVKKKMPIYGNTEKKKIKKNFWGVRLFEEGHTAEDRRLKRTARRRISRRRNRLRYLQAFFEEAMTALDENFFARLQESFLVPEDKKWHRHPIFAKLEDEVAYHETYPTIYHLRKKLADSSEQADLRLIYLALAHIVKYRGHFLIEGKLSTENISVKEQFQQFMIIYNQTFVNGESRLVSAPLPESVLIEEELTEKASRTKKSEKVLQQFPQEKANGLFGQFLKLMVGNKADFKKVFGLEEEAKITYASESYEEDLEGILAKVGDEYSDVFLAAKNVYDAVELSTILADSDKKSHAKLSSSMIVRFTEHQEDLKKFKRFIRENCPDEYDNLFKNEQKDGYAGYIAHAGKVSQLKFYQYVKKIIQDIAGAEYFLEKIAQENFLRKQRTFDNGVIPHQIHLAELQAIIHRQAAYYPFLKENQEKIEQLVTFRIPYYVGPLSKGDASTFAWLKRQSEEPIRPWNLQETVDLDQSATAFIERMTNFDTYLPSEKVLPKHSLLYEKFMVFNELTKISYTDDRGIKANFSGKEKEKIFDYLFKTRRKVKKKDIIQFYRNEYNTEIVTLSGLEEDQFNASFSTYQDLLKCGLTRAELDHPDNAEKLEDIIKILTIFEDRQRIRTQLSTFKGQFSAEVLKKLERKHYTGWGRLSKKLINGIYDKESGKTILDYLIKDDGVSKHYNRNFMQLINDSQLSFKNAIQKAQSSEHEETLSETVNELAGSPAIKKGIYQSLKIVDELVAIMGYAPKRIVVEMARENQTTSTGKRRSIQRLKIVEKAMAEIGSNLLKEQPTTNEQLRDTRLFLYYMQNGKDMYTGDELSLHRLSHYDIDHIIPQSFMKDDSLDNLVLVGSTENRGKSDDVPSKEVVKDMKAYWEKLYAAGLISQRKFQRLTKGEQGGLTLEDKAHFIQRQLVETRQITKNVAGILDQRYNANSKEKKVQIITLKASLTSQFRSIFGLYKVREVNDYHHGQDAYLNCVVATTLLKVYPNLAPEFVYGEYPKFQAFKENKATAKTIIYTNLMRFFTEDEPRFMKDGEILWSNSYLKNIKKELNYHQMNIVKKVEVQKGGFSKESIKPKGPSNKLIPVKNGLDPQKYGGFDSPVVAYTVLFTHEKGKKPLIKQEILGITIMEKTRFEQNPILFLEEKGFLRPRVLMKLPKYTLYEFPEGRRRLLASAKEAQKGNQMVLPEHLLTLLYHAKQCLLPNQSESLAYVEQHQPEFQEILERVVDFAEVHTLAKSKVQQIVKLFEANQTADVKEIAASFIQLMQFNAMGAPSTFKFFQKDIERARYTSIKEIFDATIIYQSTTGLYETRRKVVD

SEQ ID NO: 59 - protein, 1071 aa, Bacillus sp.
  REGION 1..1071: note = APG007513.1
MRELDYRIGLDIGTNSIGWGVIELSWNKDREQYEKTRIVDKGVRMFDKAEIPKTGASLAEPRRIARSSRRRLNRKSQRKKDIRNLLVQHEIISQKELTSLYPLSKSSMDIWDIRLDGLDRLLDRFEWARLLIHLAQRRGFKSNRKSELKDVETGKVLSSIQVNEKRLSLYRTVGEMWMKNADCSKYGKRRNSPNEYVFSVSRADLEKEIVTLFEAQRKFHSSYASVDLQKTYIQIWAHQLPFASGNAIVNKVGYCSLLKGKEKRVPKATYTFQYFNTLDQINRTRLGPNFQPFTKEQRDIILDKMFQRTDYYKKKTIPEVTYYDIRKWLALDETIQFKGLTYDPNEELKKIEMKPFINLKPFYEIKKVVTNYAKKTNEVFSALDYDTVAYALTVYKTDKDIRSYLKRSNNLSKRCYDDQLIEELLTLSYTKFGHLSFKAINHVLPIMQEGRTYQEAIHQLGYDTTNLKKENRSMFLPIIPDEITNPIVKRALTQARKVVNAIIRRYGSPNSVHIELARELSKSHDERKKIMTAHDENYKKNKGAVSILIDNGILNPTGYDIVRYKLWKEQGERCAYSLKKIPANTFFNELKKERSGPPVLEVDHILPYSQSFIDSYHNKVLVYGDENQKKGNRIPYTFFSEEDKEWESFESYVRSNSFFSKKKRGYLLKKAYLPRESNLIKERHLNDTRYASSYLKNFIEKNLKFKEAVGITRKKYVQTVNGVITAHLRKRWGLEKDRQETYLHHAMDAIIVACTDHHMVTKVTEYYQIKEGNKSIKKPYFPLPWMGFREEILSHLESQPIARKISEELKIGYQSPDYILVSRMPKRSVTGSAHDQTVMKKGDIDKKGKTIIIKRVHLKDIKFDENGDFKMVGKEQDLATYEAIKQRYLEYRKESKKAFETPLYKPSKKGKGNLIKKIKVEVQTKSFVREINGGVAQNGDLVRVDLFEKDNRYYMVPIYVVDTVRSELPNKAVTSSKGYEQWLSIDNSFTFKFSLYPYDLVRLVKGDEDRFLYFSTLDINSDRLNFKDVNKPSKQAEYRYSLKTIENLEKYEIGVLGDLRLVRQETRKIFK

SEQ ID NO: 60 - protein, 1070 aa, Bacillus sp.
  REGION 1..1070: note = APG05083.1
MRELDYRIGLDIGTNSIGWGIIELSWNKDREQYEKARIVDKGVRMFDKAEIPKTGASLAEPRRIARSSRRRLNRKSQRKKDIRNLLVQHEIISQKELASLYPLTKSSMDIWDIRLDGLDRLLDRFEWTRLLIHLAQRRGFKSNRKSELKDVETGKVLSSIQANEKRLSLYRTVGEMWMKNEDFSKYDKRRNSSNEYVFSVSRADLEKEIVTLFEAQRKFQSSYASADLQKTYLQIWAHQLPFASGNAIVNKVGYCSLLKGKEKRVPKATYTFQYFSTLDQINRTRLGPNFQPFTKEQRDVILDEMFNRTDYYKKKTIPEVTYYDIRKWLALDETIQFKGLTYDPNEELKKIELKSFINLKPFYEIKKVVTNYAKKTNEAFSTLDYDTFAYALTVYKTDKDIRSYLKKSNNLSKCCYDDQLIEELLTLSYTKFGHLSFKAINHVLPIMQEGRTYQEAIHQLGYDATNLKKENRSMFLPLFPDEITNPIVKRALTQARKVVNAIIRRYGSPNSVHIELARELSKSHDERTKIMKAHDENYKKNKGAISILIENGILNPTGYDIVRYKLWKEQGERCAYSLKQIPANTFFNEMKKERSGSPVLEIDHILPYSQSFIDSYHNKVLVYGDENQKKGNRIPYTYFLEGNKDWESFESYVRLNSFFSKKKRGYLLKKAYLPRESNMIKERHLNDTRYASSYLKNFIEKNLKFKEVEGSTRKKHVQTVNGIITAHLRKRWGLEKDRQETYLHHAMDAIIVACTDHHMVTKVTEYYQIKESNKSIRKPYFPLPWVGFREEILSHLARQPIARKISEELKIGYQSFDYILVSRMPKRSVTGAAHEQTIMKKGGIDKKGKTIIIKRVYLKDIKFDENGDFKMVGKEQDLATYEAIKQRYIEYGKESKKAFETPLYKPSKKGKGNLIKKIKVEVQTKSFVREVNGGVAQNGDLVRVDLFEKDNRYYMIPIYVMDTVHSELPNKAVTSSKGYEQWLTIDNSFTFKFSLYPYDLVRLVKGNEDRFLYFSTLDINSDRLNFKDVNKPSKQAENRYSLKTIENLEKYEVGVLGDLRFVRQEIRKNF

SEQ ID NO: 61 - protein, 1436 aa, Enterococcus sp.
  REGION 1..1436: note = APG04583.1
MAKNILGLDLGTNSIGWALVQQDFENKEGNILGMGSRIIPMSQDILGEFGKGNSISQTAERTGYRGVRRLRERHLLRRERLHRVLHLLGFLPKHYDEKIDFTQRFGKFINQAEPKLAFDSEFLFKDSFHEMLADFKQNQPEFLKDKNGEDCLVPYDWTIYYLRKKALTQKIEKYELAWLILNFNQKRGYYQLRGEEEKENPNKLVGFHSLKIVDVIPDAETNKKGETWYSLHLENGWVYRRSSKISLADWKDKVRDFIVTTDLNDDGSEKLDKDGIVKRSFRAPSADDWTLLKKKTEKDIDNSNKTVGTYIYDNLLLNPKQKIKGKMVRTIERKFYKQELEQILKTQKEFHSELQSENLLQDCVRELYRNNEQHQQMLEAKDFVHLFLNDIIFYQRPLRSQKSSISNCTLEFRKSKNENGEEVIHRLKVIAKSNPYYQEFRLLQWVQNLAIYTKDDDKNVTNEFLKSTQDWEDLLRWLHSKKEIKQDALIKFLIEKKGLKGKALTIEVAKYRWNYVQDKDYPGNETRYLIQSRLDKVEYAPKDFLTYENEMALWHIIYSINDKIEYEKALKSFANKKGLDEVTFVEAFKKFPPFKSDYGSFSEKAIKKLLPLMRFGTQWNWDNIDQNSKERIGKILTGEYDENIKGRVREKARHLNSETDFQALPLWLAQYVVYGRHSEADIAGKWNSVDDLKQFLDDFKQHSLRNPIVEQVITETLRAVKDIWNFYGKGAKDFFSEIHIELGREMKNTADERKRITTMVTDNENTNLRIKALLAEMALDQNVDNVRPYSPMQQEILKIYEEGVLNAEENIDDDILKISKTAQPSATDLKRYKLWLEQKYRSPYTGQMIPLNKLFTPEYEIEHIIPQSRYFDDSMSNKVICEAAVNKLKDNQIGLVFIKNHHGEVVDFGMGKQVKILEVSDYEDFVKQNYNKNRGKRNKLLLEDIPEKMIERQLNDTRYISKYITQVLSNIVRDDKEGSKDDGVNSKNIVPGNGKITTRLKQDWGLNDVWNDLVLPRFERMNTLTNSNDFTSKNTHGKTIPTVPIELSKGFSKKRIDHRHHAMDALVIACATRDHVNLLNNESSKSDTKRYDLNRKLRKYEKVAYNDPKTGERIEKEVPKDFIKPWETFTEDTRTLLENIVISFKQNLRVINKATNYYEKIENGKKVKVEQKGINWAVRKALHKETVSGQVHLDRIKVAKGKILTATRKTLDASFNEKTIESITDTGIQKILLNYLKSKDNNPEVAFSPEGIEELNKNIRLYNDGKAHQPILKVRVFEQGSKFTLGETGNKTTKFVEAAKGTNLFFGIYEDKSGKRSYETIPLNIVIERQKQGLQAVPETNEKGKQLLFTLSPNDLVYVPEEGVFDENNIKVDRIYKVVSFSTYQCFFVRNDVSTSVVNKVEYSALNKMEKSIDNIMIKENCVKLNVDRLGKISKA

SEQ ID NO: 62 - protein, 1456 aa, Empedobacter sp.
  REGION 1..1456: note = APG01688.1
MMIKNILGLDLGTNSIGWALIKQDFENKHGEILGMGSRIIPMSQDILGDFGKGNSISQTADRTKYRSVRRLRERFLLRRERLHRVLHLLNFLPQHYASQIDFEKKFGKFKSETEPKLAWENWGGKFSFLFQNSFNEMLEDFKAAGQGLKIPYDWTIYYLRKKALSQKIEKEELAWILLNFNQKRGYYQLRGEEEEENPNKLVEFYSLKIVDVVADEPQKGKSDIWYSLILENGWVYRRASKIPLFDWKDKTRDFIVTTDLNDDRSVKTDKEGNEKRSFRAPSENDWTLVKKKTEQEIDQSHKTVGTYIYETLLLNPKQKIKGKLVRTIERKFYKDELKQILEKQKEFHQELKNDDLYNDCIRELYRNNEAHQLTLSKKDFVHLLMDDLIFYQRPLRSQKSSISNCTLEFRKYKDENGIEHTQYLKAIPKSNPYYQEFRLWQWMYNLNIYRKDDEANVTKEFLNTNKDFESLFEFLNNRKEIEQKPLIKFLLEQKDINKKLLNAEAEKYRWNYVEDKKYPCNETKTMISSRLDKVENISDDFLTRDIEQKIWHIIYSVNDKIEYEKALKSFATRNDLDENSFIEAFKKFSPFKSEYGSFSEKAIKKLLPLMRLGKYWYEDEIVKHSDIYFKNIENLLGDFSNRDKKISEEDKEKWNKSINLKLQEELKDFQTAEIDLFQGLRLHIAQYLVYGRHSEASMIGKWNSAEDLEEFLKDFKQHSLRNPIVEQVITETLRVVKDIWLKYGNGAKDFFNEIHIELGREMKLPADDRKKLTNQISENENTNFRIKALLAEMMNDSSVENVRPFSPMQQEILKIYEDDVLKSDIEIEDDILKISKTAQPSPSDLKRYKLWLEQKYKSPYTGQIIPLNKLFTPEYEIEHIIPQSRYFDDSFSNKVICESAVNKLKDNYIGLEFIKQFGGTIIELGFGKSIKVFETKEYEDFVKKHYANNQGKRNKLLMEDIPEKMIERQMNDTRYISKYISGVLSNIVRVEDGSDEGVNSKNIVPGNGKITTQLKQDWGLNDVWNDLILPRFERMNQLTNSKVFTAWNENYQKFLPTVPIEYSKGFSKKRIDHRHHALDALVIACATKDHVNLLNNQSAKSDTKRYDLKKKSMKFEKVVYNDAKTGEKIEREVPKQFLKPWENFTLDVKHNLETIIVSFKQNLRVINKATNYYEKYVEKDGTKNKERVEQTGTNWAIRKPMHKDTVSGKVDLPWVKVPKGKILTATRKSLDSSFDLKSIGSITDTGIQKILKNYLAFKDGNPELAFSPEGIDDLNKNIEKYNDGKPHQPINKVRVFELGSKFQVGQSGNKKDKYVEAAKGTNLFFAVYEDEKGKRNYETIPLNEVIERQKQGLSVVDLKGTNDFYLCPNDFVYIPSGDELENINNVDFKDIKKEINERIYKVVSFTGNRLSCIPYMVATTIVNKLEFTQLNKIEFTKEKEICIKLNVDRLGNISKA

SEQ ID NO: 63 - protein, 1060 aa, Bacillus sp.
  REGION 1..1060: note = APG00969
MKQTSYSLGLDIGIASVGYGLIDNDENIVDAGVRLFPEANSKNNDGRRKSRGSKRLIRRKRHRIARVKHLLKESGIDVSYENTVLTNPYEIRCKGLTLPLTNHELSIALLHLAKRRGVHNVKSMDQEKVKGNELSTKEQLTINDNLLEEKFICELQLERLNKEGIVRSHSNRFKTADYIKEIKNLLETQAKQNTLVTEEFIEKYIEIFSGRRKYYEGPGGESKYGWKGDIEKWYEGLMGKCTYFPKELRCVKHAYSAALFNLLNDLNNLSINREEDTKLSQYEKEQIIEKIFKVRKTPTLTQIAKLLKVDPTNIKGFRTKANGTPDFLSIKIYHDLKGIIDDKQLLDDIAFLDNVAQILTVWQDSQSIQEKLKTLNKNLDDKTIKEISELKKYTQTHSLSLKLINVLLPELWETTKNQMTILSELKLKPRKIDLHNCNEIPVNMINDLIVSPVVRRSLTQSIEMINQIIKDYGHPREIVIELAREKNSEEKKNFIKSLNEKNKQINDEVIEKLNASNHRDNKGMFNKVKLWILQDGHCLYSLKPIRLEDLLNNPNHYEIDHIIPKSVSFDDSMSNKVLVYQIENSKKGNRTPYQYLTSADKTITYEKFKANITQLAKSNHKISKKKLDYLLEERDINRFHIKKEFINRNLVDTRYATRSLINLLKYYFSEKDINVKVKSINGSFTDYLRKLWNFPKDREFYHKHHAEDALIIAMANKIFTTRKIFKEQNSVFSDEQILDGEVTNILSDDQFQAEFTEKFYKVQAIKKYDKYKYSHRVDKKPNRQLFDDTLYSTREFEGEEYYIGKIKDIYNLKDKRLKKIFTKSPEKILMYQHDSQTFKKLKQIMRSYEDEVNPLAKYHKETGEYLRKECKKGNGPIVKSLKYRVTKLGVHKDITHKYENSKNKVVILSLKPFRMDVFKENGVYKFITIRYCDLKETVNSYTISEHLYKAKLKAKDIKSMDSFKWSFYKNDLLEYNGELCTFKGVNDDKKNKIEVNWVEKNFAIYAEKKNLKSKQLVKSITKSTVKSLLKYTTDILGNRYPVRNEKLKLMIRKQTFRGDL

SEQ ID NO: 64 - protein, 1090 aa, Rhizobium sp.
  REGION 1..1090: note = APG03128
MNNLLYSFDIGTNSIGWCVFALDEVGDPCRIVDLGARIYADGRDPQTKTSLAVARREARAMSRRRDRSLRRRKATLRTMIEYGLMPAHKVEQETLLRKTGDREGGDEGFNPYALRARALGEKLPPFYIGRALFHLGQRRGFKSNRKTDRKDNDKGKIALGIDELRAAMHRSGSPTLGAWLAMRRADGHPVRLRAGSEVFDAEGYAFYPERSLLEDEFRQIWTAQAVHHPQLLTSERRAHLFRVMFYQRPLKKPLVGRCSFNPAEARLSRAHPLFQEFRLYKEVNDLEVVLPDQSHRKLTLDERNALVAKLKSSRKASFSVLRRTLKLTPDLAFNKESEARKDLLGDEINSALADAKMFGVRWGGFPRARQWEIITHLKEEENPARLSDWLKSEFGLDDERVVAIANIALPEGYGRLGETALASMLEEMKTAVIPESEAAKRCGYDHSNLAKEQDEGLDILPEYQEILERHIPPGTGDPDDIYDIRKGRITNPTVHIGLNQLRRVVNALIKRHGKPRHIVVELARDLQLSEKQKADVNRRIAKNTREAEGRSQKLIEMGQLDTGYNRLLLKLWEELNQDKPEDRVCIYSGKPIGIAMLFSGEVDIDHILPWSKTLDDSQANKLLCLKSANRQKRNRTPSDVPEWRDCYEEVLARAARLPKNKRWRFAADAMQQFEAEGGFLARQLTDTQYLSRMAFEYLSALFPSEEADKWGELRQRKRVHVVPGRLTELLRRNWGLNTLLPDHNLGEMAQEKNRKDHRHHAIDAAVIGVTSRSLLQRMSGAAARLDDVAFDDLVRTVVKDNPPWPGFREELLGCINRVTVSHKPDHGTVSRAAYAQGKGQTAGKLHNDTAYGITGLQDMKGSPLVVRRKPFMALEVKDIASIRDTELQSALYDAIGSLTEKKALQEALVRFRDRHPQFKGIRRVRVLEALSVIPIVDNNGKAYKGYKGDANYRYEVWETLDGRWHTEVVSMFDAHQPGWQSPFHRQHPAARRVLKLQQNDMVAYEHPADGYTIARVVKFSNDKRIYFASHRESGSLKARDADKGDPFTYFAKANNGLRDIKCRQVRIDAAGRVFDPGPQDREARQSKGRA

SEQ ID NO: 65 - protein, 1429 aa, Chryseobacterium sp.
  REGION 1..1429: note = APG00771
MTKNILGLDLGTNSIGWALIKQDFENKQGEILGMGSRIIPMDAGDMGKFAEGATVSKTADRTKYRSVRRLRERFLLRRERLHRVLHLLNFLPQHYASQIDFEKRFGKFKVETEPKLAWKNIEGKFSFLFQNSFNEMLEDFKANEQDLKIPYDWTIYFLRKKALSQKIEKEELAWILLNFNQKRGYYQLRGEEEEENPNKLVEFYSLKVVDVLADEPQKGKSEIWYSLVLKNGWIYRRASKIPLFEWKDKTRDFIVTTDLNDDGSIKKDKDGNEKRSFRAPGENDWTLVKKKTEQEIEQSHKTVGTYIYETLLLNPKQKIKGKLVRTIERKFYKDELKQILEKQKEFHQELQNDDLYNDCIRELYRNNEAHQLTLSKKDFVHLLMDDLIFYQRPLRSQKSSISNCTLEFRKYKDENGIEHTQYLKAIPKSNPYYQEFRLWQWIYNLNIYRKDDEVNVTKDFLNTTKEFENLFEFLNSRKEVDQKALLKYFKLNEKTHRWNFVEDKKYPCNETKTMISSRLDKVENISDDFLTRNIEQKIWHIIYSVNDKIEYEKALKSFARKHHLDETSFFEAFRKFPPFKSEYGSFSEKAIKKLLPLMRLGKYWNYADIDKYSRERIQKIITGEYDENIKDKIREKAIHLTKENDFQGLQLWLAQYLVYGRHSEASMIGKWNSADDLEVFLKDFKQHSLRNPIVEQVITETLRVVKDIWLKYGNGTKDFFNEIHIELGREMKLPADDRKKLTSQISENENTNLRIKALLAEMINDHSVENVRPFSPMQQEILKIYEDGVLNSDIEIEDDILKISKTAQPSPSDLKRYKLWLEQKYKSPYTGQIIPLNKLFTPEYEIEHIIPQSRYFDDSFSNKVICESAVNKLKDNYIGLEFIKKLGGTVVECGNGKSVTVLKEDQYEDFVKKHYANNRGKRNKLLMEDIPEKMIERQLNDTRYISKYISGVLSNIVRVEDGSDEGINSKNIVPGNGKITSQLKQDWGLNDVWNDLILPRFERMNQLTNSTDFTAWNENYQKFLPTVPIEYSKGFSKKRIDHRHHALDALVIACATKDHVNLLNNQSAKSDTKRYDLKKKLMKFEKVVYHHTQTGEKIEREIPRQFLKPWENFTVDAKHNLESIIVSFKQNLRVINKATNYYEKYVEKDGTKNKERVEQTGTNWAIRKPMHKDTVSGKVDLPWVKVPKGKILTATRKSLDTSFDLKSIGSITDTGIQKILKNYLAFKDGNPEMAFSPEGIDDLNKNIEKYNDGKPHQPINKVRVFELGSKFQVGQTGNKKDKYVEAAKGTNLFFAVYEDEKGKRSYETIPLNEVIERQKQGLSVVDLKDTNDFYLCPNDLVYIPSGDELENVNNVDFKDIKKDKNERIYKVVSFSGSQIFFVRQDIATFIVNKAELSTLNKMERAIDGSMIKENCIKLNIDRLGNISKA

SEQ ID NO: 66 - protein, 1071 aa, Bacillus sp.
  REGION 1..1071: note = APG05733
MRELDYRIGLDIGTNSIGWGVIELSWNKDREQYEKTRIVDKGVRMFDKAEIPKTGASLAEPRRIARSSRRRLNRKSQRKKDIRNLLVQHEIISQKELTSLYPLSKSSMDIWDIRLDGLDRLLDRFEWARLLIHLAQRRGFKSNRKSELKDVETGKVLSSIQVNEKRLSLYRTVGEMWMKNADCSKYGKRRNSPNEYVFSVSRADLEKEIVTLFEAQRKFHSSYASVDLQKTYIQIWAHQLPFASGNAIVNKVGYCSLLKGKEKRVPKATYTFQYFNTLDQINRTRLGPNFQPFTKEQRDIILDKMFQRTDYYKKKTIPEVTYYDIRKWLALDETIQFKGLTYDPNEELKKIEMKPFINLKPFYEIKKVVTNYAKKTNEVFSALDYDTVAYALTVYKTDKDIRSYLKRSNNLSKRCYDDQLIEELLTLSYTKFGHLSFKAINHVLPIMQEGRTYQEAIHQLGYDTTNLKKENRSMFLPIIPDEITNPIVKRALTQARKVVNAIIRRYGSPNSVHIELARELSKSHDERKKIMTAHDENYKKNKGAISILIENGILNPTGYDIVRYKLWKEQGERCAYSLKKIPANTFFNELKKERSGPPVLEVDHILPYSQSFIDSYHNKVLVYGDENQKKGNRIPYTFFSEEDKEWESFESYVRSNSFFSKKKRGYLLKKAYLPRESNLIKERHLNDTRYASSYLKNFIEKNLKFKEAVGITRKKYVQTVNGVITAHLRKRWGLEKDRQETYLHHAMDAIIVACTDHHMVTKVTEYYQIKEGNKSIKKPYFPLPWMGFREEILSHLESQPIARKISEELKIGYQSSDYILVSRMPKRSVTGSAHDQTVMKKGGIDKKGKTIIIKRVHLKDIKFDENGDFKMVGKEQDLATYEAIKQRYLEYRKKSKKAFETPLYKPSKKGKGNLIKKIKVEVQTKSFVREINGGVAQNGDLVRVDLFEKDNRYYMVPIYVVDTVRSELPNKAVTSSKGYEQWLSIDNSFTFKFSLYPYDLVRLVKGDEDRFLYFSTLDINSDRLNFKDVNKPSKQAEYRYSLKTIENLEKYEIGVLGDLRLVRQETRKIFK

SEQ ID NO: 67 - protein, 1403 aa, Chryseobacterium sp.
  REGION 1..1403: note = APG06207
MVERILGLDLGVSSIGWALVEEDVENPENNKIIKLGVRVNPLTIDEKTNFEKGKSITTNAGRTSARSARRNLQRFKLRRKSLWEVLINYKIIKNDTVLAEIGKNSTFQTQYLRAKAAKEKIELDELARVLFLINKKRGYKSSRKVQSDDEGKAIDGMSVAKELYEKNYTPGQYVYDLLKNGKKQIPDFYRSDLQNELDRVWEFQKQYHPDILTDEYKKELEGKGQRATAAIFLNRYKIYTADNKGTREEKRFQAYQWRVEALSQPLDIKEVAYVITEINNNLNNSSGYLGAISDRSKKLYFNGQTIGEYLYEELSLNPHARLKNQVFYRQDYQDEFEKIWETQAKFHSVLTTELKEDVRDIIIFYQRKLKSQKGLISFCEFESKEIVIEENGKKKRKKVGLKVVPKSSPLFQEFKIWQVLNNIEIKNEDGRRYLDQEEKELLFNELNCKGNLTSQKCLEFLGFKSKETKINFKVIEGNRTNEKLYDAFLKILELKGYNVFELLKIKEDRDEAKLSELKASADEIKRMVKEIFNANLINTSILDFNAELEGKDFENQASYQFWHLIYSYEGDNSPSGNEKLYELLENKFGFKKEHSKILSTIVFPQEYGSLSAKAMRRIYPYIKDNKYSEACLLAGYNHSKQSLTKEELENRKLKEQLEVLPKNSLRNPVVEKILNQMINLVNAIISEHGKLDGVRIELARELKKSAQEREDMTKSINEATILHQKYATVLRQEFGVVNPSRNDIIRYKLYMELAGNGYKDLYTNVKIEKENIFTDKYDIDHIIPQSRFFDDSFSNKVLVPRQANLDKGNLTGYDFMSNKGAEREEHFLNVIKDLLENGSISKAKYEKLKKKGIEIGDGFIERDLRDTQYIARKAKEILFEITNSVISTSGRITDKLREDWDLVNTMKELNLDKYRRLGLTEIVINSKGEEKEVIPDWTKRNDHRHHAMDALTVAFTTRNHIQYLNYLNARKDEKHKEHQNIYAIENIITEIIEKKNGSKSRRFKTPMNRFRHEAKQHLKEVLVSHKTKNKVVTSNINKTKKKRGIHKKAELTPRGQLHKETVYGSKKFLQSREEKVSAKFDYETILMVVNPIHRNALLNRLKEYGNDPKKAFSGKNAVNKTPVYLSDSKIEVLPEKVTLSWFETGYTIRKAVTPDNFKDYKNLEKITDMGIKKILKERLDQFKGNAKEAFSNLDKEPIWLNEEKGIAIKTVTITGVSNAESLHFKKDHLGKEILDENGNKIPVDFVSTGNNHHLAIYLNEEEKLDDKMVTFYEAVLRVNQGLPVIDKNYNREKGYKFLMTLKQNEMFVFPNEEFDPSEIDLLDEKNLEQISQNLFRVQKISKVGYGNSFIRDFVFRHHLETTVEDRKELRNTTYIQLKSLEGLRNIVKVRLNHLGKIVQIGEY

SEQ ID NO: 68 - protein, 1404 aa, Sphingobacterium sp.
  REGION 1..1404: note = APG01647
MMKRILGLDLGTSSIGWAYVLEAQDENEISQIKKLGVRVNPLTTDEQLNFEKGKPITTNAGRTLARSARRNLQRYKLRRENLIEVLKREKWIDDKSILAENGNKSTFETYALRAAAASKEIKLEELARVLLMINKKRGYKSSRKVNKEDDGQLVDGMEVAKKLYHENLTPGEFVYRLLKEGKKKIPDFYRSDLQRELDLIWDFQFKYYPDLLTQDLKEELKGKGLRATSAIFWSKYKFNTAENKGTREEKKIQAYQWRKDGLTKQLEQEEVAYIIAEINGQLANSSGYLGAISDRSKELYFNKQTVGQFLFNQLQHNTHARVKNQVFYRQDYLDEFEKIWSVQSQYHQGLTEQLKEEIRDIIIFYQRKLKSQKGLISFCEFEQHEVVINGKNKIVGLRVAPKSSPIFQEFKIWQQINNVKLRNKITKEVYNLAEEQKRSLFETLNLKGKLSAYQVLNLIEVKPKEWELNYTELEGNSTNLALYNAYLDILDIEGYDVRSELKIKLNKDEITLSDLDIPVSEIKGMIRRIFQHLGINTSILDFNAQMQGDDFEKQLSYQLWHLLYSYEEDNSKTGMERLYNQLNLKFGFSLDQAKIFGKIALQEDYGNLSTKAIRKIYPYIQDVEYSVACKQAGYNHSKSSLTKEQLTNRVLKDHLDILPKNSLRNPVVEKILNQMVNVVNTLIETENDKLIKEGKNADFRFDEIRIELARELKKNAKEREELTKAINTSKSEHEKIIKILQTEDGIKNPTRNDIIRFKLYQELKNNGYKNLYTNEYIQRKDLFTNVYDIDHIIPQSRLFDDSFSNKVLVPRNINIEKGNQTAFDYVHAKFGEDGIEAYEARVERLFNLKEEGVSRSKYKKLLMRGLDIGEGFIERDLRDSQYIAKKAKAMLFEIAPSVISTSGSVTDRLREDWGLVSVMKELNLPKFKAVGLTEYLETKDGNRKEVIKDWSKRNDHRHHAMDALTVAFTKHSHIHYLNHLNARKNEKSEFFSTIKAIEIKETYVERDDLGNRKRLFKEPIPHFRSIAKEHLESVLVSHKAKNKVVTKNRNKIDGKKQAQEVLTPRGQLHKESIYGKILQYASKEEKISAKFDAATIAMVSNPRYRSALLDRLSAYGNDPKKAFTGKNSPNKSPIYLDQEKQLAVPEKVKLVWLEEDYTIRKEIGPDLKIEKVIDQGVKRILEQRLTEYGGDSKKAFSDLDNNPIWLNKEKGIAIKRVTISGVKNAEALHIKKDHLGQVLKDKDGKPMPVDFVSTGNNHHVAIYEDDNGALQERIVPFYEAVARVNNGFPIIDKHYNQHLGWKFLFSMKQNEMFLFPSEEFDPKQINLLDRSNYRLISKNLFRVQKFGELSKSGFWFRHHLETSVDVNKSLRSISYFDFYSKDFMKNIAKVRINHLGEIIHVGEY

SEQ ID NO: 69 - protein, 1453 aa, Chryseobacterium sp.
  REGION 1..1453: note = APG08032
MMIKNILGLDLGTNSIGWALIKQDFENKYGEILGMGSRIIPMDQKVLGEFGSGNSVSQTADRTKYRGVRRLRERFLLRRERLHRVLNVLNFLPIHYASQIDFEKRFGKFREEIEPKLVYNNDGFIFKNSFEEMLSDFRKHQPQILENDKKIPYDWTIYYLRKKALTQKIEKEELAWILLNFNQKRGYYQLRGEDIEEEKDKTFVRLKVEKIVDSGDNVKGKILYDVYFDNGWKYDKQIVKTEDWIERVKEFIVTESFLKNGDIKRTYKAVDSEKDWIAIKTKTEQEIEKSHKTVGTYIYETILHNPKQKIKGKLVRTIERKFYKDELRQILEKQKEFHPELQNDDLYSDCVRELYRNNEAHQLTLSKKDFVHLFIEDIIFYQRPLRSQKSSISNCTLEYRRYKDKHGVEHIQYLKAIPKSNPYYQEFRIWQWMYNLNIYKRDDDTNVTKEFLNSTEDFENLFDFLNNRKEVEQKALLKHFKLNEKTHRWNFVENKKYPCNETKTMISSRLDKVENISENFLTSEIEHKIWHIIYSVNDKIEYEKALKSFANKNNLDEVSFFEAFKKFPPFKNEYGSFSEKAIKKLLPLMRVGKYWDEDEIVKNSDTYFKNIEDLLGNIARKEENISDDDRKKYNKTVNLKLREELEIFQDAEIASFQKLRLHIAQYLVYGRHSEASIIGKWNSADDLEEFLKEFKQHSLRNPIVEQVITETLRVVKDIWMKYGNGAKDFFNEIHIELGREMKLPAEDRKKLTSQISENENTNLRIKALLAEMMNDSSVENVRPFSPMQQEILKIYEDGVLNSGIEIEDEYLKISKTAQPSSSDLKRYKLWLEQKYKSPYTGQIIPLNKLFTPEYEIEHIIPKSRYFDDSFSNKIICESAVNKLKDNYIGLGFIKQFAGAIVELGFGKNVKVFEIEEYEDFVKKHYANNRGKRNKLLLEEIPEKMIERQLNDTRHISKYISSVLSNIVRVEDGTDEGVNSKNIVPGNGKITIQLKQDWGLNDVWNDLILPRFERMNQLTNSTDFTAWNKNHQKYLPTVPIEFSKGFSKKRIDHRHHALDALVIACTTKDHVNLLNNQSAKSDTKRYDLKKKLMKFEKVVYNHTQTGEKIERDIPKQFLKPWETFTIDAKNRLETIIVSFKQNLRVINKATNHYEKYVEKEGVKMKERVEQTGTNWAIRKSLHEETVSGKITLSWVETSKGEFITATRKPLDSSFTFEKINKITDTGIQKILNNYLEAKDNNPELAFSAEGIEDLNKNIEKYNDGKSHQPIIKIRLYEKGKGRFVLGQTGNKINKYVQGSPNLFFAIYKDENGKKIFESIRLDIVIERLKQGLQAIPETNQNGVSLYQSLSPLDLVYIPTEYELESPHILDFSKLNKTQITRLYNTNDFSGVTAYFSQNSFAKHIYPKEMDLSWNEKKQKLSGSFDSKTASYNNTSIKDIFIKVKVDRLGNISKA

SEQ ID NO: 70 - protein, 1093 aa, Brucella sp.
  REGION 1..1093: note = APG05712
MKTLGIDLGTASIGWAILDEASIIASGVRIFSQSEMAGRDPQSKASLAVARRDARGARRRRDRYLKRRRRLLDLLTEHGLAPADEKSRKALVREYEDGKDGDLSNSVYALRARALDEALTPYEIGRAIFQLNQRRGFKSNRKTDSNDPEQGKIATAIHVLDAKMDEDKARTFGEWLHMRRLKGLSVRARMTADGDSYDFYPSRAALEREFDRLMASQKRFHPDLLNSSVIDDIRKVVFHQRPLKPVQPGKCSYNHRESRLPKAHPLFQKFRLLKEVNELEIVGEDQRYVKLTPAQRDVLTLALRTGLTKQGRLPFSKLRSILKLGKEVRFNKEKDNRTDLEGDVIHFRVSRPDCFGNRWAAMPVEEQAAVTEKLRTEPDYSALLDWLKNEAGLDEAHARAVADTPVPDGFGRMGPSALSALADAMEHEIDAQGFVITEAEAAKRVYGRTNSEADPGRKGVDQLPKYQEVLQRHIPPGTGEPDDPYDEYMGRITNPTVHIALNQLRRLVNALIRKYGKPNKIAIEVGRELKLNEKQRNEVNREIGQNTRAAMARGQQLVEIFKQPNTGYNRLRLELWEDLNREQPLKRLCTYCGKAIAAHMLFNGETDIDHILPYSKTLDDSKANRLLCCTPCNREKKNYAPANVLQWRDHYGEILARATALPKNKQWRFAEDAMTRYEAEGGFLARQLTDMQYISRLALTYLAHLYDYEEPDLDGVYKRHDRVRALPGRMTEMLRRQWALNELLHGHNLAGGDGAKEKNRLDHRHHAIDAIVIACTSQSLINRLSTAAGEAEERGAARVVERIDPPWPSFREDVREAVNAIVVSHKPDHGTASRSGYDKGRGQTAGKLHNDTAYGETGEKDHNGNNLVVRRIAISDIKRSADIMKIRTNAHGHSELRDRLYEATRDLEGKAFEQAVTAFVKHDAKFKGIRHVRVTEVQNPVWITHGGGKYKKGYLPGGNDRFDVWELPDGKWDAEVVTTFDAHRPDFTPRMRIEHHNARKIMSLKKGDMIAYDDPDSGKRVIAIVRKFDQRNKQLYLDPHNEAGNLDQREKEKTYKPLRPMPNPLKKYRPRQVRVDEIGQVFDPGPWWEKRSD

SEQ ID NO: 71 - protein, 1054 aa, Staphylococcus sp.
  REGION 1..1054: note = APG01658
MKEKYILGLDLGITSVGYGIINFETKKIIDAGVRLFPEANVDNNEGRRSKRGSRRLKRRRIHRLERVKLLLTEYDLINKEQIPTSNNPYQIRVKGLSEILSKDELAIALLHLAKRRGIHNINVSSEDEDASNELSTKEQINRNNKLLKDKYVCEVQLQRLKEGQIRGEKNRFKTTDILKEIDQLLKVQKDYHNLDIDFINQYKEIVETRREYFEGPGQGSPFGWNGDLKKWYEMLMGHCTYFPQELRSVKYAYSADLFNALNDLNNLIIQRDNSEKLEYHEKYHIIENVFKQKKKPTLKQIAKEIGVNPEDIKGYRITKSGTPQFTEFKLYHDLKSIVFDKSILENEAILDQIAEILTIYQDEQSIKEELNKLPEILNEQDKAEIAKLIGYNGTHRLSLKCIHLINEELWQTSRNQMEIFNYLNIKPNKVDLSEQNKIPKDMVNDFILSPVVKRTFIQSINVINKVIEKYGIPEDIIIELARENNSDDRKKFINNLQKKNEATRKRINEIIGQTGNQNAKRIVEKIRLHDQQEGKCLYSLESIALMDLLNNPQNYEVDHIIPRSVAFDNSIHNKVLVKQIENSKKGNRTPYQYLNSSDAKLSYNQFKQHILNLSKSKDRISKKKKDYLLEERDINKFEVQKEFINRNLVDTRYATRELTSYLKAYFSANNMDVKVKTINGSFTNHLRKVWRFDKYRNHGYKHHAEDALIIANADFLFKENKKLQNANKILEKPTIENNTKKVTVEKEEDYNNVFETPKLVEDIKQYRDYKFSHRVDKKPNRQLINDTLYSTRMKDEHDYIVQTITDIYGKDNTNLKKQFNKNPEKFLMYQNDPKTFEKLSIIMKQYSDEKNPLAKYYEETGEYLTKYSKKNNGPIVKKIKLLGNKVGNHLDVTNKYENSTKKLVKLSIKNYRFDVYLTEKGYKFVTIAYLNVFKKDNYYYIPKDKYQELKEKKKIKDTDQFIASFYKNDLIKLNGDLYKIIGVNSDDRNIIELDYYDIKYKDYCEINNIKGEPRIKKTIGKKTESIEKFTTDVLGNLYLHSTEKAPQLIFKRGL

SEQ ID NO: 72 - protein, 1076 aa, Bacillus sp.
  REGION 1..1076: note = APG06498
MSELDYRIGLDIGTNSIGWGVIELFWNKDRERYEKVRIVDKGVRMFDKAEIPKTGASLAEPRRIARSSRRRLNRKSQRKKEIRNLLVQHGVITQEELDLLYPLSKKSMDIWDIRLDGLDRLLNHLEWTRLLIHLAQRRGFKSNRKSELKDAETGKVLSSIQVNEKRLSLYRTVGEMWIKDAEFSKYDRRRNSPNEYVFSVSRADLEKEIVTLFEAQRKFQSSYSSKNLQETYLQIWAHQLPFASGNAILNKVGYCSLLKGKERRIPKATYTFQYFSALDQVNRTRLGPDFQPFTQEQKEIILDKMFQRTDYYKKKTIPEVSYYDIRKWLELDETIQFKGLNYDPNEELKKIEKKPFINLKAFYEIKKVVANYAERTNEAFSTLDYDAIAYALTVYKTDKDIRSYLKKSNNLSKRCYDDQLIEELFTLSYTKFGHLSFKAINRVLPIMQEGRTYQEAIQQLGYDTTNLKKENRSMFLPLIPDEITNPIVKRALTQARKVVNAIIRRYGSPNSVHIELARELSKSHDERKKIMTAHDENYKKNKGAISILIENGILNPTGYDIVRYKLWKEQGERCAYSLKEIPPDTFFNELKKERNGSSILEVDHILPYSQSFIDSYHNKVLVYSDENRNKGNRIPYTYFLETNKDWEAFERYVRSNKLFSKKKREYLLKKAYLPRESELIKERHLNDTRYASTFLKNFIEQNLQFKEVEVNLRKKRVQTVNGVITAHLRKRWGLEKNRQETYLHHAMDAIIVACTDHHMVTRITEYYQIKESNKSVKKPYFPMPWEGFRDELLSHLASQPIAKKISEELKAGYQSSDYIFVSRMPKRSVTGAAHNQMIRRKGGIDKKGKTIIIKRVRLKDIKFDENGDFKMVGKEQDLATYEAIKQRYLDHGKNLKKAFETPLYKPSKKGTGNLIKRVKIEGQTKAFVREVNGGVAQNSDLVRVDLFEKDDKYYMVPIYVPDTVCSELPKKVVKSGKGYEQWLTLDNSFTFKFSLYPYDLVRLVKGDEDRFLYFGTLDIDSDRLNFKDVNKPSKQNEYRYSLKTIEDLEKYEVGVLGDLRLVRKETRRNFHEIKIN

SEQ ID NO: 73 - protein, 1150 aa, Enterococcus sp.
  REGION 1..1150: note = APG09882
MYSIGLDLGISSVGWSVIDERTGNVIDLGIRLFSAKNSEKNLERRTNRGGRRLIRRKTNRLKDAKKILAAVGFYEDKSLKNSCPYQLRVKGLTEPLSKGEIYKVTLHILKKRGISYLDEDDTEAAKESQDYKEQVRENAQLLTKYTPGQIQLQRLKENNRVKTGINAQGNYQLNVFKVSAYANELATILKTQQAFYPNELTDDWIALFVQPGIAEEAGLIYRKRPYYHGPGNEANNSPYGRWSDFKKTGQPATNIFDKLIGKDFQGELRASGLSLSAQQYNLLNDLTNLKIDGEIPLSPEQKEYILAELMTKEFTRFGVNDVVKLLGVKKERLSGWRLDKKGKPEIHTLKGYRNWRKIFAESGIDLATLPTETIDCLAKVLTLNTEREGIENTLAFELSELAESVKLLVLDRYKELSQSVSTQAWHRFSLKTLHLLIPELMNATSEQNTLLEQFQLKSDVRKRYSEYKKLPTKDVLTEIYNPTVNKTVSQAFKVIDALLVKYGKEQIRYITIEMPRDDNEEDEKKRIKELHAKNSQRKNDSQSYFMQKSGWSQEKFQTTIQKNRRFLAKLLYYYEQDGICAYTGLSISPELLVSDSTEIDHIIPISISLDDSINNKVLVLSKANQVKGQQTPYDAWMDGSFKKINGKFSNWDDYQKWVESCHFSHKKENNLLETRNIFDSEQVEKFLARNLNDTRYASRLVLNTLQSFFANQETKVRVVNGSFTHTLRKKWGADLDKTRETHHHHAVDATLCAVTPFVKVSRYHYAVKEETGEKVMREIDFETGEIVDEMSYREFKKSKKYERKTYQVKWPNFREQLKPVNLHPRIKFSHQVDRKANRKLSDATIYSVREKTEVKTLKSGKQKITTDEYTIGKIKDIYTVDGWEAFKKKQDKLLMKDLDEKTYERLLSIAETTPDFQEVEEKNGKVKRVKRSPFAVYCEENDIPAIRKYAKKNNGPLIRSLKYYDGKLNKHINITKDSQGRPVEKTKNGRKVTLQSLKPYRYDIYQDLETKAYYTVQLYYSDLRFVEGKYGITEKEYMKKVAEQTKGQVVRFCFSLQKNDGLEIEWKDSQCYDVRFYNFQSANSINFKGLEQEMMPAENQFKQKPYNNGAINLNIAKYGKEGKKLRKFNTDILGKKHYLYYEKEPKNIIK

SEQ ID NO: 74 - protein, 1408 aa, Sphingobacterium sp.
  REGION 1..1408: note = APG02675
MKRILGLDLGTSSIGWAYVLEAQDENEISKIEKLGVRVNPLTTDEQLNFEKGKPITTNAGRTLARSARRNLQRFKLRRNNLIEVLKREKWIDDKSILAENGNKSTFETYALRAAAASKEIKLEELARVLLMINKKRGYKSSRKVIKEDDGQLVDGMEVAKKLYHENLTPGEFVCRLLKEGKKKLPDFYRSDLQRELDLIWDFQFKYYPELLTRDFKEELKGKGLRATSAIFWSKYKFNTAENKGTKEEKKIQAYQWRKDGLTKQLAKEEVAYIIAEINGQLANSSGYLGAISDRSKELYFNKQTVGQFLFNQLQQNTHARLKNQVFYRQDYLDEFEKIWCIQSQFHQALTEQLKEEIRDIIIFYQRKLKSQKGLISFCEFEQHEVVVNGKNKVVGLRVAPKSSPIFQEFKIWQQLNNVKLRNNITKEVYNLAEEQKKLLFETLNLKGKLSAYQVLSLIEGKPKEWELNYTELEGNSTNSALYNAYLNILDIEGYDVRSELKIKLNKDEITLSDLDIPVSEIKDMIRRIFQHLGINTSILDFDAQMQGDDFEKQLSYQLWHLLYSYEEDDSKTGMDRLYNQLNLKFGFSLDQAKFIGKIALQDDYGNLSTKAIRQIYPYIQDAEYSAACKLAGYNHSKSSLTKEQLTNRVLKDHLDILPKNSLRNPVVEKILNQMVNVVNTLIDTENDKLIKEGKNADFRFDEIRIELARELKKNAKEREELTKAINTSKEQHEKIIKILQTEDGIKNPTRNDIIRFKLYQELKNNGYKNLYTNEYIQRKDLFTNIYDIDHIVPQSRLFDDSFSNKVLVPRNINIEKGNQTAFDYVRTKFGEDGIEAYEARVERLFNLKEEGVSRSKYKKLLMRGSDIGEGFIERDLRDSQYIAKKAKAMLFEITPSVISTSGSVTDRLREDWGLVSVMKELNLPKFKAVGLTEYLETKDGNRKEVIKDWSKRNDHRHHAMDALTVAFTKHSHIQYLNHLNARKNEKSEFFSSIKAIEIKETYVERDDLGNRKRLFKEPIAHFRTIVKEHLERVLVSHKAKNKVVTKNRNKIDGKKEAQEVLTPRGQLHKETIYGKILQYASKEEKISAKFDAATIAMVSNPRYRSALLDRLIEYGNDPKKAFTGKNSPSKSPIYLDQQRQLAVPEKVKLVWLEADYTIRKEIGPDLKIEKVIDQGVKRILKQRLSVYDGDTKKAFSDLDNNPIWLNEEKGIAIKRVTISGVKNAEALHTKKDHLGQVLEDKDGNTMPVDFVSTGNNHHVAIYEDSEGNLYDRVVSFYEAVERINQNLPIVDRHYKQEEGWKFLFSMKQNELFVFPSINFDPKEIDLLDKKNYKEVSKHLFRMQKFSKVEYGNSAVRDYVFRHHLETSIIDTKELRDIAYKVFKSIGEFKSFVKIRTNHLGEIVHLGEY

SEQ ID NO: 75 - protein, 1429 aa, Chryseobacterium sp.
  REGION 1..1429: note = APG01405
MMIKHILGLDLGTNSIGWALIKQNFENKYGEILGMGSRIIPMSQDILGEFGKGNSVSQTAARTDYRGIRRLRERFLLRRERLHRILNVLNFLPEHYASQIDFDKRFGKFKVETEPKLAWKNSDGKFSFLFQTSFNEMLEDFKAHGQDLKVPYDWTIYYLRKKALSQKIEKEELAWILLNFNQKRGYYQLRGEEEEENPNKLIEFYSLKIIDVLADEPQKGKSDIWYSLVLENGWIYRRSSKTSLLDWKDKIRDFIVTTDLNDNGSVKTDKEGNEKRSFRAPGENDWTLVKTKTEQEIDRSRKTVGTYIYETLLQNPKQKIKGKLVRTIERKFYKEELKQILEKQKEFHYELQSDDLYDDCIRELYRNNEAHQLTLSKKDFVHLFMEDIIFYQRPLKSQKSSISNCTLEFRKYKDENGVEHTQFLKAIPKSNPYYQEFRIWQWIFNLNIYKKDNDDNVTKEFLSTTEDFENLFEFLNNRKEIDQKALLKHFKLNEKTHRWKYVEDKKYPCNETKTMISERLKKVENISDDFLTRGMEQKIWHIIYSVNDKTEYEKALKSFAEKNNLDENSFFEAFRKFPPFKSEYGSFSEKAIKKLLPLMRLGKYWSYANIDLYSKNRIQKIITGEFDENIKDRVREKAIHLTAENDFQGLQLWLAQYIVYGRHSEATMIGKWNSADDLEEFLKEFKQHSLRNPIVEQVITETLRVVKDIWLKYGNGAKDFFNEVHIELGREMKQTKDERANATKTITENENTNLRIKALLAEMMNDHSVENVRPYSPMQQEILKIYEDGILKSDIEIDDDILKISKTAQPSSSDLKRYKLWLEQKYKSPYTGQIIPLNKLFTPEYEIEHIIPQSRYFDDSLSNKIICESAVNKLKDNYIGLGFIKQFGGTIIECGFGKRVKVFKAEEYEEFVKKHYANNRGKRNKLLLEDIPEKMIERQMNDTRHISKYISGILSHIVRVEDGTDEGVNSKNVIPGNGKITTQLRQDWGLNDVWNELVLPRFERMNQLTNSTDFTSWNENHQKYLPTVPVEFSKGFSKKRIDHRHHALDALVIACATKDHVNLLNNQSAKSDTKRYDLKKKLMKFEKTVYKDPQTEKRIEREVPKYFLKPWETFTVDAKNKLETIIVSFKQNLRVINKATNYYEKYVDKDGVKTKERVEQTGTNWAIRKPMHKETVSGKIDLPWVKVPKGKILTATRKSLDTSFDLKAIASITDTGIQKILKNYLEFKESPELAFSPEGIEDMNKNIKKYNGGKPHQPISKVRVFELGSKFQVGQTGNKKDKYVEAAKGTNLFFAIYEDRKGKRSYETIPLNEVIERQKQGLSVVDLKNINDFFLCPNDLVYIPSGDELENGGSIEIKNITKEKSERFYKVVSFSGSQIFFVRHDIAVSIVNKGEFSTLNKMERAIDGSMVKESCIKLKIDRLGNVLKA

SEQ ID NO: 76 - protein, 1440 aa, Chryseobacterium sp.
  REGION 1..1440: note = APG06250
MKNILGLDLGTNSIGWALVKQDFKNKQGEILGMGTRIIPMSQDILGDFGKGNSVSQTAERTKYRSARRLRERFLLRRERLHRVLNILNFLPEHYASQIDFEKRFGKFKVETEPKLAWKNIEGQFSFLFQNSFNEMLEDFKANAQDLRIPYDWTIYYLRKKALSQKIEKEELVWILLNFNQKRGYYQLRGEEEEENPNKLVELYSLKVVDVFVDEPQKGKSDIWYSLVLENGWIYRRASKISLFDWKDKIRDFIVTTDLNDDGSVKTDKDGNEKRSFRAPGENDWTLVKKKTEQEIEQSHKTVGMYIYETLRANPKQKIKGKLVRTIERKFYKEELRQILEKQKEFHQELQNDDLYNDCIRELYRNNEAHQLTLSKKDFVHLFIEDIVFYQRPLRSQKSSISNCTLEFRKYKDENGAEHTQYLKAIPKSNPYYQEFRLWQWIFNLNLYKKDNDENVIKEFLTTTQDVENLFEFLNNRKEIDQKALLKHFKLSEKTHRWNFVEDKKYPCNETKTMIATRLEKVENISDDFLTREIEQKIWHIIYSVNDKIEYEKALKSFALKHNLDENSFFEAFRKFPPFKSEYGSFSEKAIKKLLPLMRLGKYWDYANIDQFSKGRIQKIINGEYDENIKDRVREKAVHLTSENDFQGLQLWLAQYIVYGRHSEASIAGKWNSADDLEEFLKDFKHHSLRNPIVEQVITETLRVVKDIWLKYGKGAKDFFNEIHIELGREMKLPADDRKKLTNQITENENTNLRIKALLAEMMNDHGVENVRPFSPQQQEILKIYEDGVLNSDIEIEDEYLKISKTAQPSPSDLKRYKLWLEQKYKSPYTGQIIPLNKLFTPEYEIEHIIPQSRYFDDSFSNKIICESAVNKLKDNYIGLGFIKQFGGTIIELGFGKSVKVFDIDEYEDFVKKHYANNRSKRNKLLLEDIPEKMIERQINDTRYISKYISGILSNIVRLEDGSDEGINSKNIVPGNGKITTQLKKDWGLNDVWNDLILPRFKRMNQLTNSTDFIAWNENFQKFLPTVPIEYSKGFSKKRIDHRHHALDALVIACATKDHVNLLNNQSAKSETKRYDLKKKLMKFERVVYLHTQTGEKIEREVPKHFLKPWENFTVDVKHNLDTVIVSFKQNLRVINKATNYYEKYAENGGARNKARVEQKGINWAIRKPMHKDTVSGKVDLPWVKVPKGKILTATRKSLDTSFDLKSIGSITDTGIQKILKNYLMLKDGNPELAFSPEGIEDLNKSIEKYNDGKPHQPINKVRVFELGSKFQIGQAGNKKDKYVEAAKGTNLFFAVYEDKNGKRSYETIPLNEVIERQKQGLPVVDLRSTNDFYLCPNDLVYILSDDERGNMTNNDFENLSDEQVKRIYKFVSCTGGEGHFIPYANATEIIKNENGTNSKSERMQNFYDGSCMLDKNSKPIMIKENCVKLKVDRLGNISKI

SEQ ID NO: 77 - protein, 1071 aa, Bacillus sp.
  REGION 1..1071: note = APG06877
MRELDYRIGLDIGTNSIGWGVIELSWNKDREQYEKTRIVDKGVRMFDKAEIPKTGASLAEPRRIARSSRRRLNRKSQRKKDIRNLLVQHEIISQKELTSLYPLSKSSMDIWDIRLDGLDRLLDRFEWARLLIHLAQRRGFKSNRKSELKDVETGKVLSSIQVNEKRLSLYRTVGEMWMKNADFSKYGKRRNSPNEYVFSVSRADLEKEIVTLFEAQRKFHSSYASVDLQKTYIQIWAHQLPFASGNAIVNKVGYCSLLKGKEKRVPKATYTFQYFNTLDQINRTRLGPNFQPFTKEQRDIILDKMFQRTDYYKKKTIPEVTYYDIRKWLALDETIQFKGLTYDPNEELKKIEMKPFINLKPFYEIKKVVTNYAKKTNEVFSALDYDTVAYALTVYKTDKDIRSYLKRSNNLSKRCYDDQLIEELLTLSYTKFGHLSFKAINHVLPIMQEGRTYQEAIHQLGYDTTNLKKENRSMFLPIIPDEITNPIVKRALTQARKVVNAIIRRYGSPNSVHIELARELSKSHDERKKIMTAHDENYKKNKGAISILIENGILNPTGYDIVRYKLWKEQGERCAYSLKKISANTFFNELKKERSGPPVLEVDHILPYSQSFIDSYHNKVLVYGDENQKKGNRIPYTFFSEEDKEWESFESYVRSNSFFSKKKRGYLLKKAYLPRESNLIKERHLNDTRYASSYLKNFIEKNLKFKEAVGITRKKYVQTVNGVITAHLRKRWGLEKDRQETYLHHAMDAIIVACTDHHMVTKVTEYYQIKEGNKSIKKPYFPLPWMGFREEILSHLESQPIARKISEELKIGYQSSDYILVSRMPKRSVTGSAHDQTVMKKGGIDKKGKTIIIKRVHLKDIKFDENGDFKMVGKEQDLATYEAIKQRYLEYRKESKKAFETPLYKPSKKGKGNLIKKIKVEVQTKSFVREINGGVAQNGDLVRVDLFEKDNRYYMVPIYVVDTVRSELPNKAVTSSKGYEQWLSIDNSFTFKFSLYPYDLVRLVKGDEDRFLYFSTLDINSDRLNFKDVNKPSKQAEYRYSLKTIENLEKYEIGVLGDLRLVRQETRKIFK

SEQ ID NO: 78 - protein, 1091 aa, Rhizobium sp.
  REGION 1..1091: note = APG09053
MDIETLFAFDIGTNSIGFCVFALDENGEPYRIIDIGTRIYADGRDPQSKASLAVARREARAMSRRRDRYVNRRKAVLRTLTEYGLMPAEASARQALIAETSDRNGAAGEASANPYALRAMALDEKLPLYWIGRVLFHLNQRRGFKSNRKTDRKDNEKGVIALGIGELRAAMHKTKARTYGEWLAARREDGHVTRLRAGSDAFEGDGYAFYPERSLLEAEFREIWARQSSFYPDVLTEARGDHLFQVMFYQRPLKKPRVGKCAFNPLEERLAKAHPLFQEFRLYKEVNELELVLPDHSHKKLDIEQRNALVILLRANREVTFKKLRTALKLAPDIVFNKESESREKLRGDEVHSVLADKKRFGPQWGALSRERQWQIIQTLKDEENPEKLFGWLKEEFGFEGEKADAIANAPLPEGYGRLGETALSSMLDEMKAAVIPEAEAAKNCGYDHSKLGEDREEGEAFLPPYQEILSRQIPPGTNDPADIYDIRMGRFTNPTVHIGLNQLRRVVNALIARHGKPQFVSLELARDLQLSEKQKAEANRAIAKNTREAAARSKKLGEMGQLDTGYNRLLLKLWEELNPSKPEDRVCIYSGKPIGIDMLFSAEVDVDHILPWSKTLDDSQANKLLCLKSANRQKRNRAPADVPEWRDRYEEILARAARLAPNKRRRFAPNAMAEFEAEGGFLARQLTDTQYLSRMAREYLSCLFPSAEIDRRGERKKKIRVIVSPGRLTEMLRRNWGLNNILPDHNLGEMTQAKNRKDHRHHAIDAAVVGVTTRSLLQRIATAAGRLDEADFENLVRKMVSENPPWPTFREELQAAVNGIVVSHKPDHGTVSRKGYAEGKGRTAGRLHNDTAYGFGTDASGNPVAVRRKLFTSLEAKDIPMIRDPELQAELYAAIDGLDDRRALQDALLSFRRTHPKFKGIRRVRMAETLSFIPIRDSQGNVYKGYKGDANYRYDVWETLDGKWHADVVTMFNAHQPDWRSPVHQEHPTARRVLRLQQNDMVAYEHPNDGYTIARVVKFNTAGIVYFASHRESGSLKARDADKQDPFKYFSKSAAGLKDIQCRQIRIDAAGRVFDPGPQDRASKSTRKTN

SEQ ID NO: 79 - protein, 1401 aa, Myroides sp.
  REGION 1..1401: note = APG04293
MKRILGIDLGTTSIGWAYVHEAENENEISSIEKLGVRVNPLTVDEQINFEKGKPITTNATRTLFRSARRNLQRFKLRRKHLIEILKHNNWISKQTLLTENGNHTTFETISLRDKAATQKVTLEELARVLLMINKKRGYKSSRKVNNTEEGQLIDGMEVAKKLYHEQLTPGQLSLQLIKQGVKRLPDYYRSDLNHELDLIWAFQQKFYPHILTSEFKELLKGKGLRATSNQFWTNYNFNTADNKGTREEKKLQNYQWRSDALIKQLDKEIVAYVISEINGQINNSSGYLGAISDRSKELYFNQLTVGQYLHRQLIANPHTRLKSQVFYRQDYLDEFEKIWETQSKFYPKELTTVLKNEIRDTVIFYQRKLKSQKGLISFCEFEQEQKIINGKTKTIGHRVIPKSSPLFQEFKIWQQLHNVVLRNKKTNVITPLAEEQKSHLFEELNLKGKLSSTQILKLIEDKPKDWELNYSELEGNNTNKALYNAYLDILDLEGYDIRDELKIKLNKDDIELSDLDVNASEIKEMIFSIFKHLGINTEILEFDATLKDKAFEKQASYQLWHLLYSYEEDNSPTGLDRLHNLLQKKFNFTLDQAKLVGNVLFQDDYGNLSSKAIKNIFPYITDNNYSTACELAGYKHSKHSLTKEENEKRELKSRLTILTKNSLRNPVVEKILNQMINVINTLIESENDKLVAQGKEPNFQFDEIRIELARELKKNAKEREELTKSMTQGKTNHEKIIKILQKEDGIKNPTRNDITRFKLYSELKNNGYKDLYTNEYIERKDIFSKEYDIEHIIPQSKLFDDSFSNKTLVRRNVNLKKGNQTAYDFILSEYGQEKANEFETRITNLYSLGKDEGISKSKYKKLLMQESEIGKGFIERDLRETQYIAKKAKSLLLEITRNVVSTSGGITDRLREDWGLVNVMKELNLKKFRDAGLTEFVEMKDGNKKEVIIDWTKRNDHRHHAMDALTIAFTKHNHIQYLNHLNARKNTKDELHTNIIAIEKKETTIITDERGNKKRIFKEPIPNFRNIAKSHLEAILVSHKAKNKVVTKNINKISGKKIGQQTLTPRGQLHKETVYGKIRQYVSKEEKVGPKFTKEVIELVSNPTYRDLLLKRLQENNNDPKKAFGGKNALSKSPIYINLEKNIIVPEVVKLVWLEDDYTIRKEISPELKIDKVVDEGVKRILQNRLALYNGDAKIAFSDLDNNPIWLSKDKGITIKRVTLSGVKNATALHTKKDHLGQPILDHKGQEIPVDFISTGNNHHVAIYEDKNGKLQESVVSHFEAVERVNQQLPIIDKTFNQHLGWKFLFTMKQNELFLFPSDDFNPNEIDLFDTRNYAVISKHLFRAQKLSTKDYSFRHHLETNVEDIKDLKTITWRREGLNGIQNIVKIRTNHLGEIVHIGEY

SEQ ID NO: 80 - protein, 1432 aa, Chryseobacterium sp.
  REGION 1..1432: note = APG01308
MAKNILGLDLGTNSIGWALINQDFENKQGKILGMGSRIIPMSQDILGDFGKGNSVSQTAARTGYRGVRRLRERFLLRRERLHRVLNIINFLPEHYASQIDFEKRFGKFKEETEPKLAYNKDGFVFKDSFEEMLADFKNYQPQLLENDKKIPYDWTIYYLRKKALSQKIEKEELAWILLNFNQKRGYYQLRGEDFEEEKDKMFVRLKVEKIIDSGDNVKGKILYDVYFENGWKYDKQIVKTEDWIERVKEFIVTESFLKNGDIKRTFKAVDSEKDWIAIKTKTEQEIDKSHKTVGVYIYETLLQNPKQKIKGKLVRTIERKFYKDELKQILEKQKEFHQELKNDDLYNDCVRELYRNNEAHQLTLSKKEFVHLLMEDIIFYQRPLRSQKSSISNCSLEFRKYKDENGVEHIQYLKAVPKSNPYYQEFRIWQWIFNLNIYKRDDEQNPVTTEFLNTTTDIENLFEFLNNRKEVDQKALLKHFKLNEKTHRWKYVEDKKYPCNETKSMISERLKKVENIANDFLTREIEQKIWHIIYSVNDKIEYEKALKSFAKKNNLDENSFFEAFKKFPPFKSEYGSFSEKAIKKLLPLMRLGKYWNCENISDDSKERIQKIINGEYDENIKDRVREKAIHLTSENNFQGLQLWLAQYVVYDRHSEASMIGKWNSADDLEEFLKEFKQHSLRNPIVEQVITETLRVVKDIWLKYGNGAKDFFNEIHIELGREMKQTKDERLDATKRITENENTNLRIKALLAEMMNDNSVENVRPYSPMQQEILKIYEDGVLNSGIEIEDEYLKISKTAQPSPSDLKRYKLWLEQRYKSPYTGQIIPLNKLFTPEYEIEHIIPQSRYFDDSFSNKIICESAVNKLKDNYIGLGFIKQFGGTIVECGLGKNVKVFEVNEYEDFVKKHYANNRGKRNKLLLEEIPEKMIERQLNDTRHISKYISGVLSNIVRVEDGSDEGVNSKNIVPGNGKITTQLKQDWGLNDVWNDLILPRFERMNQLTNSTDFTAWNENHQKFLPTVPIEFSKGFSKKRIDHRHHALDALVIACATKDHINLLNNQSAKSDTKRYDLKKKLMKFEKGVYNHPQTGERIQRDVPKQFLKPWESFTIDAKNNLDKIIISFKQNLRVINKATNYYEKYVEKNGIKTKERVEQTGTNWAIRKPMHKETVSGIVNLPWVKVPKGKILTATRKSLDTTFDLKSINSITDTGIQKILRNYLEFKGSPELAFSPEGIEDMNKNIEKYNDGKLHQPINKVRVFELGSKFQVGQTGNKKDKYVEAAKGTNLFFAVYEDKNGKRNYETIPLNIVIERQKQGLLACPESNEKGEKLLFQLSPNDFVYLTTEEENDNATPINFSLLSKEQINNLYKIVSFTGNRLYGIPICVATTIVNKAEYTQLNKIEFTKEKDLLLKLNVNRLGDVKTFTANDIRKIFNRQE

SEQ ID NO: 81 - protein, 1092 aa, Bacillus sp.
  REGION 1..1092: note = APG06646
MRYSIGLDIGTTSIGNAVINKDLQRFEHLGVRIFDAAENPKDGSSLSAPRRLARSSRRRLRRRKHRVERTKQLLINKGLLTKTQVKNLYNSKNINLDIWDIRVSGIDRKLFNNEFARVLIHFSKNRGFKSNRKSELKEDDNGAILSAVKENRELMDEKGYRTIAEMLVSDEKYEGTKRNKGGDYSHVVARSDIENEICLLFQKQREYGHPFATEENEEAFLSIWSSQRPFSTKDDIVKKIGNCTLEPKEKRAPKSTYTFERFRALDKLNRLRILSTTAPSRPLTNEERKSILSSLFSKKEVKYKELRKLLKLTDDQRFNEIYYSPDETIEKTENRTFLSLESQYKIKKIIEKTESKNMQSSYHPIDYDTIGYALTVFKDDKDIQHYLQNSYIDSKGKAIPNMANREYNLELIEELLGLSFAKFGHLSLKALNNILPYMEEGEPYHIACEMASYQFSQRLSKEKHRLLPPIPVDEIPNPVVVRALTQVRKVLNSIIKKYGPPSDIYIELAREMSKPFKERKSLEREFNENRQINEKAKAHISELYRIPNDPRPHDILKFKLWNEQNGICPYSLKPISIEYLFNIGYAEVDHIIPYSRSFDDSNGNKVLVLTRENQNKLNRTPYEWFGHEENRWEDFVSFIRTMKVGKKKKNMLLKKNFDEEQEEQILSRNLNDTRYITRYIKSFIEDNLEFRTEENKEQYVHTVNGAYTSLMRKRWGLNKDRRGNDLHHAVDAAIIAVSLPFKNKVNAYFKRQETGLSKLLNNKKDIFPEPWRNFIKELEARMIQDPEKMKRALESLELETYGEIFLNKLKPIFVSRMPKHSIKGQIHEETIRRVRGFTEEGFLVTVKKTRLDQIPFDKNGDFPMYGKETDIKTYMAIKQRYLEYGQDKQKAFAVPLRKPSKNPKNAPIVRSVKIEGKANRVVMLDDKAAADNASIVRTEVFRHKKTGEYYLTPVYVADILSNKIPDRLITIKKSYSDWDRITDEHEYLFSLYNNDLVKIILPKEKETKKYTGGNHLWQEGFFYFKGVDSSNAGIKIINHLNSFEARIGTKRLIAFEKYQVNPLGEINKVHGEKRPGELLNKEEIKENRKNIS

SEQ ID NO: 82 - protein, 1735 aa, Pedobacter sp.
  REGION 1..1735: note = APG06622
MTKNILGLDLGTNSIGWALIKIDHENKTLKIIALGSRIIPMDGQEFSKFNAGQKIESAAGNRTALHRARITKERYLLRRDRLHLVLNLLEALPNHYKIEVDFERNDKRCGQFKEGKEPKMAYLPTKNLENKFDFYFEEAFNEMIEDLQKVNPEIKNEKKKRVPKDWTIYFLRNKAMSQKVSLEELAWVLLSYNQKRGTDSEEIENEDEKSEIKEQIDLKVIKAEKKVDVNGAFFEITLNDAENFKYKEYTTKQLTFEDDVKEVTKILKLDEAGNIINEKTAYQISDLYNLTLANIEHTDINDKKAKHKYDFIYTNGWCTEKKKENFDVTYQKLEKQIKEESKVITELFVVSNKYDFAGKPESIIPSIKLPDFNSEGSKDWTLLKKKTEKEIVKSEKTLSGWIYDVLKNDVNTGERTKIIGGLFQTIDRKFYREELYQIINTQRKFHTSTLDDKDTFEKCVKLLYPHNKDHSKTLLENKQALTNLLIEDILLYQRPLKSKKSEISDCKYEIDYWKEDVNISTGEVVEIPVYKKAIFASHPLFQEFRIWDKIHNIKLIQLESKDADGNTQTNVDITSQYFKPENYRALFNHFNGRSTVAIDDFLKFCEEQFKLGIGKKGERKILWNYPVEEEFKGNETRKGFENRFRKCGFDGFDDFMTQQKEIELWHYLYSVSSAERKKVSQVKDSSDPKFGKTGIWNFFTKYFKDENISLETLEKLCRDFETYPKFTSKYASYSVKALNKMLAVMRVGKNFLTAESVNEKWQEKYIERADTIIKKNNEIDWSAESIDLTDIILNDVNVKNGEIPFPKGLFNTFKSFETVDDFEFLNLTQASYFIYGRHSELAQAKYWNSPTKIREEITKELKHHSLNNPTAEKVLKETLKVVADIWEIYGNSEEKFFNEIHLEVARELQKSNQEKKDIIERQKNNRAENNRIRNILEEFLSSSPYNAKRGNQDHFERLKIVEDGAKVRSYSDKEFYSNNKDKFSKIDIEVILKKKKITQSDFEKYKLWIEQGYKSPYTDQIIKLTDLFDGNKYNVDHIFSRAAITNDSLNNKVVCEAVINRFKSYKTGREFIAQFGGKTHTIFDDKLNKNVTFSLIDEDAYVSLVKSQFKDAKRLILLSKEVPKAFTESQLNNAKYIARKAMELLSHIVREEGEVEFRSKNVLPVSGAITDRLKKEWKINQIWTELLKPRFERLNKIHNSEAFGSYAISKSGHQYFDINTKYILGENDKFDLKRLDHRHHALDALIIALCTDNHVQYFNNINSGITNKKKGKMEAIKKQRAGIKRQIMYSEKDKENPNEKVWRYMLPGSFRNKESVNNEKDSVVDLSWENNYSAKESNDYRKTILECLDNCIVSFKNDFKIVSKSSNKYESYYDENGNLRLDSNGKPQKEFISQQNNNQKHWSVRKPLHTDNPSAEITLQFDRLKLIDNLGKVDLIIEEKIKDAVKEILGMHNNKIGKAESYLKKNPLILEEKKIEYTDFKISNKKYRKRQPITNLSVRTGTGALPTYDSVVDRINKVSDFVLRNELLQHLKINDNDIDKAFSIEGINEFNSNRKIPVFRLPISESATLKFKIGHKNSNSHKWVETGGNFHFRIADEENSRDYETIPLRIAIEMEKDNIIRRQIVDNENEIVLSPNDLVYVPLEKNEIVDFNNLTIQQIKRIYKFVFSTKKEAHFIPYSSSAEIIKNENGTNGYSERTKDFFDGNVLQDDKGKPIQVKSVCWKLKVDRLGNISKA

SEQ ID NO: 83 - protein, 1224 aa, Chitinophaga sp.
  REGION 1..1224: note = APG02787
MKKLIVGLDLGVNSIGWAVVGDDDSNRQILGMGSRIIPLSPDDNNEFVTGNAISKNAKRTEKRTQRKGYDRYQQRRRKLVAFLERHSMMVEKELMCLPPLELWALRNKGITQALSSRELGRVLYHLNQRRGYRSSRSEESSDGKKNTAYVEEVKGRYEELKTRGITIGQHFYQKLQTAHNRNEPYRIKQQVFPRQAYIDEFDAIINQQKNHHSSLTADEIAFLRDEIIYMQRPLKSQKGLVSICEFEGQYRKNAKDAEVFVGPKVAPRSSPLAQVCKIWESINNITFTNKRREPYPINTDQKLRLFDALNKTERLSQKAIFFILGIKPGDGYTGNKQTAKGIQGNLTNAAISTIIPERKDLLNFELKIVVDEEDAHLINRSNGEIISTVQKKTVSADYERSPFFRLWHVIYSISDIDKCIETLMEKFGLTKEQAVALSRLDFRKAGFANKSARAMRKILPYLMDGHIFSDAMSLAGYNHSASLTHEENLKRQLKGSLPLLKKNSLRQPVVEKILNQMIGVMNAIIKEWGRPDEIRVELARELKQSAEERNKAFAALSKREREGEIITKRIEAEFRQFGIRATRNNILKWRLFHEISNDEARLNATCVYCGHPFGITDALRGSSVDIEHIIPKSKLFDDSQGNKTLVHRRCNEDKGDRTAFDFMSAKGESVLASYIETVDRLYQSNVISRHKRDRLLTTGDDIPKDFIERQLRETQYIARKAKEILEQICYNVWSTSGQITEYLRRIWGWNDVLMNLQLPVYRDLGLTEWKEYTDRDGNLHRQEVIKDWSKRNDHRHHAIDALTIACTRQGFIQRINRLNATNNREEMRASLNGNYDPKKNLLENYIFALKPFSTKQVEVAAAQILISFKPGKRVATLSKLKAKGKNSGTGVIVPRGPLSEESVYGRVRLMDSKKQPVRYLFEHPELIFKPYIRVLVEERLASYSQDLKKALASLKKDPIYLDGTKTIILEWGSCYKDEVVIKYPLTDIKAKDTQFIIDGHIRAIVNERLSQYKGNEKKAFEHPLYSDAACTKEIRSVRCLTGLTAVVSVKKDESGREIGFVKPGNNHHIALYTDAEGQKREHLCTFWHAVERKKWGMPAVITQPGVIWDNILQKQDNFPQAFLEKLPLEAWTFDKSLQQNEMFIVGLTIEEVQTCIDSFDYARLSKHLYRIQKLSSTGYKIVLRHHLATTIEHTRDMIGIASPSSFTGIKVYVSKTGKISMPHD

SEQ ID NO: 84 - protein, 1457 aa, Mucilaginibacter sp.
  REGION 1..1457: note = APG06248
MKNILGLDLGTNSIGWALIQSDFDNKEGKILGTGSRIIPMSQDIKDEYGKGNSISQTADRTRFRSLRRLRERHLLRRERLHRILNILGFLPEHYADQIDFKNRLGQYLPEKEPKLAYRNNEFIFKASFEEMLIDFREQQPEMLQGDKKVPYDWTIYYLRKKALTQKVEKAELAWLILNFNQKRGYYQLRGEEQQENPNKKVEFHSLKVVDVIADETQRGKAETWYSLILENGWVYRRSSKTPLDNWRDKQRDFIVTTDLNDDGSIKKDKDGNIKRSFRAPDENDWTLLKKKTEQDIDHANKTAGAYIYDHLLVAPDQKIKGKLVRTIERRFYKTELKAILAKQQNFHAELQNKDLFLDCVRELYRHNLSHLSNLNQKDTIHLLTEDIIFYQRPLRSQKSSIGNCPLEFRRYQNKEGGDQTEYLKVIPKSHPLYQEFRLWQWIYNLGIYQKEDDTNVTADLIKGIQGYQDLFDFLNSKKEIKQDTLIKFLLSQTGLKGKELNKAALTLRWNFVEDKTYPCNETGTEIRARLAKVAYIPENFLTAEKALSLWHIIYSVNDKKEYELALRKFAKKHQIDEETFFINFQKFPPFQSEYGAFSEKAIKKLLPLIRLGKYWHWEAIDPKSQERIEKILSGEADQNIKERIREKAMHLTREEHFQGLQLWLANYIVYDRHAEAANPDKWSTVSDLEDYLKELKQHSLRNPIVEQVVTETLRVVKDIWLTYGNGAKNFFDEIHIELAREMKNTMEERKRLTSIVTDNENTNLRIKALLVELFEDGNIENVRPYSPIQHEALKIFEDGILNSGIEIDDDILKISKTPQPTSTELKRYKLWLEQKYRSPYTGNVIPLNRLFTTDYEIEHIIPQSRFFDDSFSNKIICESAINKLKDKQLGLEFIKNHAGTIVELGLGKTARVFDEERYQDFVKANYTKNPGKRSKLMLEEIPDKMIARQLNDTRYISKFITSVLSNIVRSETKDDGVNSKNVLLCNGRITSVLRQDWGMNDIWNELILPRFERLNQITDSTVFTAWNENHQKFLPTVPMGFSKGFQRKRIDHRHHAMDALIIASCTRDHINLLNNEYAKSSKRFDLNRKLRKFEKVAYKSPVNGQQIDKDIPTVFIKPWQRFTIDAKCSLEDIIVSFKQNLRVINKTTNYFDGYKDEHGIVNFDNKGAPVKQQRKQTKGDSWAIRKPMHKDFVYGKVDLKHIKIPKGKFATAIRKSLDTTFDQKKIQTITDTGVQKILINYLQSKDNKAELAFSPEGIEDMNQNIRAYNDGKLHQPIKKVRVFEIGSRFPLGETGNKKTKYVETAKGTNLFFAIYQHKNKRNYETVPLNTVIERQKQHLSPVPTEDDKGGTLLFYLSPNDLVYVPTPDELGNNLGGLDIRNLNKEQRRRIYKVEKASGVECYFIRQDIAYLIKSYDATTKIGELESQNKLQTTMSSDRLKIADVCIKLKIDRLGISR

SEQ ID NO: 85 - protein, 1662 aa, Acidovorax sp.
  REGION 1..1662: note = APG06007
MKKILGLDIGTTSIGYSIIKVSDEKNENIISDKVAASDINNDRIGIFEEAIGVRIINQDTDRFDRGLKLNDPKGSTLTPTANRRKFRGVRRMRNRYKLRRNKLYKVLSILGLTPDESYFTNKKGKRGKDNDIGKALYGLRERAAREKISLSELARVLLHLNQLRGYSSDRFANDEETKFDYYLTEVVEADWENRTAVFEKGSTEDVKYYQFKAKLRFVEPYVIVEDDEKTILYEVEGYIFKKELDFEVGDFITIKAPEFKQNKKGKVVIEEYYKITPTKPDATDWKYKYQTLHKNLSDWCKAGGTVGSYFYKNFYELTTLSRIRNNVVNREWYENEFDAIWTLQYEFYKDFFEKIDVSELVKGVFKDYSAVLNDVISKSGNKAQLQTLIKDKIIFYQRPWQQAKSKGRCEFEKIKVKRKFAIKGTGTKELREEHIGRKVVPRSHPIFQDFKVWQQINNVRLIWNTADEKINLFENAELSEKLTGKTIEKVKELLFKKLQGSKTLSWRTFVKEELGLDTYDEIEEKRKSKVSKKQGLDIETGEIVDSFFSVNFRKRKRDGTFDDIKLKGNTTKAELQNILKEKRAEWFDTLHNQNKKVTNLQLLWEIIYDITNSDATKVSSIIKKHFDFDESVCLTLAKVQFDDAGMANLSAKAIRNLLPLMSDGANYSKITKAKVDELISLNTSETDVDADDKLNGLKDFVTDRKARIRLSKFSNENDFKYLNYWEAAAIVYGSHSSKKSSETKIMERVKNHSMNNPVVEKIVNEAISIVNLLKEKYGFDEIRIELSRELRASADERQQMWEGMSNGAAKNEWAKKMLREIKQAMLDNNRDISYLDTEISNSNLDKIKIIEDVVKYQKPVEFKTKEKEYKLTEPTKAEVTKYLLWLEQNFKCPYTNQPIPLTDVFARGKVVEIEHIIPRERYYSNAYANKVITWREVNQEKGNKTAYEFIVSKRNPAGTVQVGKKEISLVSASQWENHVKEMFPKSGKRTNLLRKEIPEDPIERTLKENQYINKKLKEKLGELVGSDKVWVTSGAITDMLREKWKLNDIWKELVQERFLKFNNGEVKDRLNLKYTTKYYNNKTNQYEDVEKFAGMSKRIDHRHHALDAIIIACTKQSHIQYINNLNAINSADIENDDNKKTKYKGIKTDVCIGNSSSKFKFPWDENKFIPEVKQALQNILISHKNSNVLISPSKHRNNKDINSGKVASVRGELHLQTNYAKKKYFENEKIDIVKLIPLLFKKKFENQNQTLVRFKSFDEIIKEAVLKEKYQNVLISLFKDYDSEKLSTQTTKDFSKKILKRIEDEKLFIHEKSGEKMTWLSTFTEKNASVRPMGLAMDLNSEKEIKDISNPRLRRIGQYRLNYINKKIIEIKALKLPFKEEENNRIREVREIPLYNNAIYELRIKQKDGKYHWVEIKDVQHSDLENIEYAKQETTIAVKNKIKDFSLDELKERYISNPIFLSEKPTPVKKARQKSFFQDLYQLNDGRYVYSRDVFMTYVFVPEDSNRKDAKRELEFLKFFDAVKIVTLEKPEKIDYQKLIKKEDHKLLFTLSKNDIVYIPEEILTDEQIAEINWNDKRDIVPKLFVVKEMTPSRNEIVFQHLYKSDSIRVNGDEAKNILNTEKLEEQIKYGDTNMWKRCIKVDIDKLGTEIKPYWENNKIVL

SEQ ID NO: 86 - protein, 1075 aa, Bacillus sp.
  REGION 1..1075: note = APG02874
MDYRIGLDIGTNSVGWGVIRMQYNDLLERYEKQGIVDAGVRMFDKAEIPKTGASLAAPRREARSSRKRLRRRSQRKKAIRYLIILHELLSEDQLQQLYPLQKESIDIWDIRLESLDRVLNQTEWARLLIHLGQRRGFKSNRKSEYKEEETGKVLVNIQENQKALQQYRTVAEMWMKDAKFSQFDKKRNAPGEYLFSVSRYDLQNEIQTIFESQRNLGSPYATTDLEEEYISVWSKQLPFASGEDILKKVGYCSLERKERRIPKATYTFQYFILLDGLNKIRVGADARQLTTEERSILIEKILTRNDYFSKKSLPDLTYGDLRKWLALDSSLLFKDLTYDPNEKVSKVEKKVFANLKSLYELRKVVETSSNGQSFERIDYDTFGYALTVYKTDEDIRRYLKKPSNLAHKVYEEDLIERLLSLSYEKFGHLSLKAIQTILPYMEDGMMYTEAVQAAGYDITGLQSAKRTLLLPTIPADITNPVVRRALTQTRKVVNAIIKRYGSPLTIHIELARELSKDHQERQQILKNQQANYERNKGAISVLVENGILNPTGYDIVRYKLWKEQGERCAYSLKVIPPSVFFGELKRERNHIPTLEVDHILPYSQSFMDNYHNKVLVYSDENQKKGNRIPSQYLMAVSPEKWTKFEEYVSSNKGFSKQKRQYLLKKDYSSRERDIVKERHLVDTRYATRFMKNFIEKTLLFKESRSSSLTKRVQTVNGKITAHFRKRWGLEKERTETYLHHALDAIVVACTDQHMVTRVTEYYQERERNVRQPYFPWPWEGFRDELLNYLNRQPDSLEISQSIKQNLFLRDYLMVSRMPKHSVTGMSHKQTIRSKACVDEKGKVKTTKRVLLQDIKFDSNGDFKMIGKEQDMATYNAIKERFLSSGGNVKSAFTEPLHKPSKKGKGNVIRKVTVEDQTKSFVRDVNGGVAENGSLVRIDLFEKEGMYYVVPIYVGDTVLKQLPIKISASNRGYYKWVELDENYRFKFSLYAHDLIRIVTKDEDRFFYFSYFDNDGNRIKFLNINSPTGKNENRYGVRSIKLIEKYNVSTLGDISLVKSEERQLFQGMKKKVLNIIN

SEQ ID NO: 87 - protein, 1068 aa, Bacillus sp.
  REGION 1..1068: note = APG03850
MKYVLGLDIGIASCGWAVINQEKHRIEDLGVRIFDKAENPKDGKSLATPRRDARSTRRTLRRKKHRMQRIKILLVKHGLLSKTEIDHLYESATEIDVWYLRLNALERRLNPKEFARVLIHLAKRRGFKSNRKETTLSENGQILENISENLQIMEQQNYRTVGEMILKDKKFENHKRNKDGTYIGTVTRQQLKEEIQMIFNAQRLYKNDYATEEFESSYLEIWASQRPYASKDQIEKMIGYCTLEPKEKRVPKASWSFQYFVALQTINNLRLINKDRIEELSFEEKNQIMNLALEKSIVKYIDIRKLLSIPNEFHFNNLLYSADTVDTAVENKKCIEFKEYHSINKLYKQIYGKSVPNLLPIDYDTIACGLTIFKDDKDILAYLQNKYVNAKGKPISNLAKKTYDDTFIQALLTLNFSKMGHLSFKALKNIIPFLEEGLSYDKACEKAGYNFKGTSHAEKTKYLPVIPQNTNPVVHRALSQTRKVINAIIKKYGSPSAIHIETARELSKTFQERKEIDSMYQDNSKKNEHAIHKLKELGLINPSGINIVKFKLWNEQDGRCMYSGKYIEPHRLFEEGYTEVDHILPYSRSLDDSYNNKALTLGIENQRKGNKTPYEYIGKTSIWHEFETRVQSNKRINKKKQQKLLLQYFSYTREQEFIKRNLNDTRYATIYLSTLIQQHLIFSESSRKKKVHTVSGIITSHLRSRWGFNKDRKEGHIHHALDAVIVAVTSDHMIQRVTKYYKLKELNRNLQAKRMQFPEPWEGFRLELEARISPNTQQYLKRILFKNYADVNLSEIKPIFVSRMPKRSITGELHQETIRKLIGYNEKGKVLTAIKTKLEDIPFDANGDFPMYGKETDLYTYNAIKERYLSHKKDKRKSFQDPLYKPTKSGEIGPLIKSIKIMDTRTIVNPVNQGKGVVYNSKIARTDVFKKDEKYYLIPIYTIDLLKNILPQKAITAGKGYEDWTTIDPSFTFLFSLFPNDLIQIVPSKNKTIKARTTVSKKEVLLPSLTGYFKGVHSGTAGITVETHDGSVIANVGSKQLLLFEKYQVDVLGHYTKIKEEKRIGMVI

SEQ ID NO: 88 - protein, 1081 aa, Bacillus sp.
  REGION 1..1081: note = APG07553
MQYVLGLDIGIASCGWAVINQEKERIEDLGVRIFDKAENPKDGKSLAAPRRDARSTRRTLRRKKHRMQRIKILLVKHGLLSQTELDHLYESATEVDVWNLRLDAIERKLNPKEFTRVLIHLAKRRGFKSNSKETTLSENGQILESISENQQIMEQKNYKTIGEMILKDKKFENHKRNKDGTYIGTVTRQQLQDEIQIIFNAQRLYKNNYATKEFESSYLEIWASQRPYASKDQIEKMIGYCTLEQKEKRVPRASWSFQYFVALHTINNLRLISKDRIEELSFKEKKQIMNLALEKPIVKYIDIRKLLSIPNELHFNSLLYSADTVDTTVENRKCIELKEYHSINKVYKQIYGKNALNLLPIDYDTIAYGLTIFKDDKDILEHLKNKYVNAKGKPINNLAKKTYDDTFIQALLTLNFSKMGHLSFKALKNIIPFLEEGLSYDKACEKAGYNFKGTSYTEQTKYLPVIPQNTNPVVHRALSQTKKVINAIIKKYGSPNAIHIETARELSKTFQERKEIDSMYQDNSKKNEHAIHKLKELGNINPSGINIVKFKLWNEQDGKCMYSGKYIEPHRLFEEGYTEVDHILPYSRSLDDSYNNKTLTLGIENQRKGNKTPYEYMGNTSIWDEYEIRVQSNKKINKKKQQKLLLQHFSYAREQEFIERNLNDTRYATIYLSSLIQQHLIFSESSRKKKVHTVSGIITSHLRSRWGFNKDRKEGHIHHALDAVIVAVTSDHMIQRVTKYYKLKELNRNLQAKRMPFPEPWEGFRLELEARISPNTQQYLKGLRFKNYADVNLCEIKPIFVSKMPKRSITGELHQETIRKFIGYNEKGKVLTAIKTKLEDIPFDANGDFPMYGKETDLYTYNSIKERYLSHKKDKRKSFQEPLYKPTKSGGIGPLIKSIKIMDTRTIVNPVNQGKGVVYNSKIARTDVFKKDDKYYLIPIYTIDLMKNILPQKAITAGKGYEDWITIDHSFTFLFSLFPNDLIKIVPSKNKEIKARSTSSKKEILLPSLIGYFKSVHSGTAGITVESHDGRFIANVGSKQLLLFEKYQVDVLGHYTKIKEEKRIGMATCNDNKKSTAFGSL

SEQ ID NO: 89 - protein, 1404 aa, Chryseobacterium sp.
  REGION 1..1404: note = APG03031
MKKTLGIDLGTNSIGWVIRNADLLDNQIEDFGVITFEKGVASEKGNEFPKVQKRTESRGKRRNYQSEKYRKFALLAFLIQKNMCPLTMDEFCNWKDYRKGKKREYPQSEEFLNWIRFDFNGDGLPDFHLFGKEKDDSYYVFRAFAADENHKNVFDNNPHILGRVLYQMVQRRGFKGRDEEEAKTMLVGSDKNGTKGRNDIEEYIEKYKTLGAALYYHQKDFGGRIKQRYNLRKDNENELKEICKIHQLSQEDYEKLWKAIIWQRPLRTQKGLVGNCIYEKNKKRVAVSHPLYEEYRTWVFINNLNIIPPFGEEKQNYISEKIYPLFYKSKPDFELSDIDKQLKKDGAKRTSKHNDKTKVLSVKLLKQFQDVFGEDWKQKLQWDINGDRNSQPEKKEKSLYTFEDLWHILLTFDGQENLKKFALEKLNLDDEKAIKFSKIKLQQGYATLSISAIKKILPYLQRGFLYSHAVYMANLYKMLGETTISETLTNHFSDEILKILENDDFNRKNSAIINSLISEMLNDDNRYYIADNRNLDKTEEQIVLKSITDNYGLETWGNFDEEKKMEIIDFVSSKYLEFLKKTYTEKGNLFIQPERIHDKIFNFLKETYHVSEDKIKYLWHPSEQENYAKADEYFEYSIGSKKYYVKEESTQNFLSRNPNAEFDGRQLKLLGNPEPLSKGFKNPMALKSLHKLKNLVNYLLQTGKIDEGTRVVIEIARELNDKNKRKAIENWQKDREKENEAFRKEIEVYKEQFPNINLIDENTLIRKIRLWHEQNKICLYTGKTIPFSELIIGNKYDFEHTIPASISFDNELKNLTISDSSYNRLYKGKKFPTQLSNYDSEQTINGESCNSILRNIEFIFGERIVEYKEIKGKTEKIVKWKKIDELEKQFDEWKKKASYASTKEIKDNCIVKYHTIKMDLDYLKSKLATFTITEYKAGWRNSQIRDTQIITKYALPYFKTLFKRVSVEKGGVTDIFKKVYKVQSRNSKKDRSVHSHHAQDAAILTLIPNAFHRERIIKAYENEIDNRTGKTYHEQPLDWENFSEKYILELQDKVLINNLTDNRTITQTYKTVRKRGKVVYDIDENGNSLKRVSKGDTIRGQLHGETFYGAIKQPVRDEDNKILFDENKKMILKDEIYLAVRKPLVYKKDANSPGFKTLDEVEKVIVDKGLFKMIKKQVEESDFKTALIDGVYMLNESGEKVNKIRRIRCFENGLKYTTAIKVHEHSFVSHKEYKQSTLATNGENTYCLFYKNDKGKAMKILSIVDLAELKLKNIQNLYNEPEFSSFEVGKGKNKYKIPLYSVLKSGDKVLFYKENIYELKDLEQKELSDRMFKMYQFEKDGRIKFRHHLAAGIDTELKKENPENSSVNFEEKQVFLRLSQGQWNFAIDGKDFEISLDGKINWKF

SEQ ID NO: 90 - protein, 1092 aa, Bacillus sp.
  REGION 1..1092: note = APG09208
MRYSIGLDIGTTSIGSAVINNDLQRFEHLGVRIFDAAENPKDGSSLSAPRRLARSSRKRLRRRKHRVERTKQILINKGLLTKTQVKNLYNSKNVNLDVWDIRVSGLDRKLFNDEFARVLIHFSKNRGFKSNRKSELKEDDNGAILSAVKENKELMEEKGYRTIAEMLVLDERYEGTKRNKDGDYSHVVSRSDIENEIRLLFQKQREYGHPFAIEENEEAFLAIWSSQRPFATKDDIVKKIGTCTLEPREKRAPKSTYTFERFRALDKLNRLRILSTTTPSRPLTNEERDSILNSLFSKKEVKYKELRKMLKLTDDQRFNEIYYSPDETIEKTENRVFLSSESQYKIKKIIEKTESKNMLSTYCPIDYDTIGYALTVFKDDKDIQHYLQNRYVDSKGKAISNMANREYNLELIEELLGLSFSKFGHLSLKALNNILPYMEEGEPYHIACEMAGYQFSQRLTKEKHRLLPPIPVDEIPNPVVVRALTQVRKVLNSIIKKYGPPSDIYIELAREMGKPFKERKSLEREFNENRQVNEKAKAHISELYRVPNDPRPHDILKFKLWKEQNGICPYSFKPISVDYLFNIGYTEVDHIIPYSRSFDDSNGNKVLVLTNENRNKLNRTPYEWFGHDENRWGDFVSFVRTMKVGKKKKDMLLKKNFDEEQEEQILSRNLNDTRYITRYIKSFIEDNLEFRTEENKKQYVHTVNGGYTSLMRKRWGLNKDRRGNDLHHAVDAAIIAVSLPFKHKVNTYFKRQEIGLSNLSNNKKDIFPEPWRNFIKELEARMIQDPEKMKTALESLELETYGEIFLNKLKPIFVSRMPKHSIKGQIHEETIRRVRGLTEEGFLVTVKKTRLDQIPFDKNGDFPMYGKETDIKTYMAIKQRYLEYGQDKQKAFAIPLRKPSKNPENAPIVRSVKIEGKANRVVMLDDKAAADNASIARTEVFRHKETGEYYVTPVYVADIVSNKIPDRLITLKKPYSEWDRITDEYEYLFSLYNNDLIKIVLPKEKETKKYTGGNHLWQEGFFYFKGVDSSNASIKIIDHLNSFEVRIGIRRLIAFEKYQVNPLGEINKVHGEKRPGELLNEEEIKENRKNIS

SEQ ID NO: 91 - protein, 1150 aa, Enterococcus sp.
  REGION 1..1150: note = APG08770
MYSIGLDLGISSVGWSVIDEETGKIVDLGVRLFSAKNSEKNLERRTSRGARRLIRRKTNRLKDAKKLLEAIGFYEDKALKNVCPYQLRVKGLTEGLTKGELYKVVLHIVKKRGISYLDEDDAEAAKESQDYKEQVRKNAQLLTKYTPGQIQLQRLKENNRVKTGINGQGNYQLNVFKVSAYADELATILKTQQALYPNELTDDWIALFVQPGIAEDAGLIYRKRPYYHGPGNEANNSPYGRWSDFQKTGQPAANIFDKLIGKDFQGELRASGLSLSAQQYNLLNDLTNLKIDGEQPLSPTQKEFILTELMTKEFARFGVNDIAKLLGVKKEQLSGWRLDKKGKPEIHTLKGYRNWRKIFAEAGIDLATLPTETIDCLAKVLTLNTEREGVENTLAFELPELAEPVKSLVLDHYKELSQSISTQAWHRFSLKTLHLLIPELIKSTSEQNTLLEQFQLKAGVRKRYSDYKKLPTKEVLAEIYNPTVNKTVSQAFKVMDALLEKYGKDQIHYITVEMPRDDNEEEERKRIKELQTKNSQRKNDSQQYFLQKSGWSQEKFQATIHKNRRFLAKLLYYFEQDGVCAYTGNPISPELLVSDSTEIDHIIPISISLDDSINNKVLVLSHANQVKGQQTPYDAWMAGAFKKINGKFSNWDEYQKWVESRPFSRKKANNLLETRNIFDSEQVQNFLSRNLNDTRYASRLVLNTLQSFFENQDTIVRVVNGSFTHTLRKKWGADLDKTRETHHHHAIDASLCAVTPFVKVSRYHYAVNEETGEKFMREIDVETGEILDEIPYREYKKAKHYERKTYQVKWSNFREQLKPLTIHPKIKFSHQVDRKANRKLSDATIYSVREKTEVKTLKSGKEKITTDEYTIGKIKDIYTVDGWEAFKKKQDKLLMKEFDEKTYELLVTIAATTPDFQEVEEKNGKVKRVKRSPFAVYCEENGIPAIRKYAKKNNGPVIRSLKYYDGKLNKHINITKDEKGRPVEQTKNGRKVTLQSLKPYRYDIYQDLETKAYYTVQLYYSDLRFVEGEYGITEKEYMKKVAEQTKGQVVRFCFSLQKNDGLEIEWKDSQRYDVRFYNFQSANSINFKGLEQEMMPAENQFKQKPYNNGAINLNIAKYGKEGNKLRKFNTDILGKKHHLSYEKEPKNIIK

SEQ ID NO: 92 - protein, 1053 aa, Staphylococcus sp.
  REGION 1..1053: note = APG08167
MKRHYILGLDIGITSVGYGIIDYETREVIDAGVRLFKEANVENNEGRRSKRGARRLKRRRKHRLQSVKKLLFDYDLLTNHSELSGINPYEARVKGLSQNLSEVEFSGALLHLAKRRGVHNVNEVEEDTRNELSTKEQISRNSKALEEKYVAELQLERLKTDSEVRGAINRFKTSDYVKEAKQLLKVQKEYHQLDQSFIDTYIDLLETRRTYYEGPGKGSPFGWKDIKEWYEMLIGHCTYFPEELRSVKYAYNADLYNALNDLNNLVISRDDNEKLAYYEKFQIIENVFKQKKKPTLKQISKEIFVNEEDIKGYRVTSTGKPEFTKFKIYHDIKGIKERKEIIENAEVLDQIAEILTIYQSSEDIQEELAKLNSELTQEEIEQISKLTGYTGTHSLSLKAINLILDELWHTSDNQMAIFNRLKLVPKKMDLSQQKEIPTTLVDDFILSPVVKRSFIQSIKVINAIIKKYGLPSDIIIELAREKNSKDAQKLINEMQKRNRQTNERIEEIIRTTGKENAKYLIEKIKLHNMQEGKCLYSLEAIPLEDLLNNPFNYEVDHIIPRSVSFDNSFNNKVLVKQEENSKKDNRTPFQYLSSSDSKMDYETFKKHILNLSKGKDRISKKKKVYLLEERDINRFSVQKDFINRNLVDTRYATRELMTLLRSYFSVNNLDVKVKSINGGFTSFLRRKWKFKKERNQGYKHHAEDALIIANADYVFKEWKKLDRANKVMENQTVEENQAESMPEIETEQEYKEIFITPHQIQHIKDFKDYKYSHRVDKKSNRELVNDTLYSTRKDDKGNTLIVNNLNGLYDKDNDKLKKLMNQSPEKLLMYHHDPQTYQKLKLIMEQYGGEKNPLYKYHEETGNYLTKYSKKDNGPVIKKIKYYGNKLNVHLDITDDYPNSRNKVVKLSLKPFRFDVYLDNGVYKFVTIKNLDVIKKEDYYEVNSKCYKEAKKLKQISDQAEFIASFYNNDLIKVNGELYRIIGVNNDLLNRIEVNMVDITYKEYLETMNDKRTPRIFKAITGKTQSIKKYSTDILGNLYEVKSKQNPQMIMKR

SEQ ID NO: 93 - protein, 1129 aa, Streptococcus sp.
  REGION 1..1129: note = APG03021
MSNGKILGLDIGVASVGVGIIDAKTGNVIHANSRLFSAANAENNAERRGFRGARRLTRRKKHRVKRVRDLFEKYDISTDFRNLNLNPYELRVKGLTEQLTNEELFAALRTIAKRRGISYLDDAEDDSTGSSDYAKSIDENRRLLKTKTPGQIQLERLEKYGQLRGNFTVYDENGEAHRLINVFSTSDYKNEARKILEAQSNYNKQITDEFIEDYIEILTQKRKYYHGPGNEKSRTDYGRFRTDGTTLENIFGILIGKCSFYPEEYRASKASYTAQEFNFLNDLNNLKVPTETGKLSTEQKEYLVDFAKKSKALGASKLLKEIAKIVDCSVDDIKGYRVDNKDKPDLHTFEPYRKLKFNLSSIDIDELSRETLDKLADILTLNTEREGIEDTIKRNLPSQFTEEQISEIVQIRKNQSSAFNKGWHSFSAKLMNELIPELYVTSEEQMTILTRLEKFKVNKKSSKNTKTIDEKEITDEIYNPVVAKSVRQTIKIINAAVKKYGDFDKIVIEMPRDKNAEDEKKFIDKKEKENKKEKDDSLKRAAFLYNGTDNLPDGVFHGNKELKTKIRLWYQQGERCLYSGKLISIHDLVHNSNKFEIDHILPLSLSFDDSLANKVLVYAWTNQEKGQKTPYQVIDSMDAAWSFREMKDYVLKQKRLGKKKREYLLTTENIDKIEVKKKFIERNLVDTRYASRVVLNSLQTALKELGKDTKVSVVRGQFTSQLRRKWNIDKSRETYHHHAVDALIIAASSQLKLWQKQENPMFESYGENQVVNKETGEILSISDDKYKELVFQPPYQGFVNTISSKGFEDEILFSYQVDSKFNRKVSDATIYSTRKAKLGKDKKDETYVLGKIKDIYSQDGFDTFIKRYKKDKTQFLMYQKDPLTWENVIEVILRDYPSEKLSEDGKKTVKCNPFEEYRRENGLICKYSKKGNGTPIKSLKYYDKKLGNCIDITPEKSKNRVVLRQISPWRADIYFNLETLKYELMGLKYSDLSFEKGTGKYHISQEKYDAIREKEGIGKKSEFKFTLYRNDLILIKDTLNNCERMLRFGSKNDTSKHYVELKPLEKGTFDSEEEILPVLGKVAKSGQFIKGLNKTNISIYKVRTDVLGNKFFIKKEGDKPKLDFKNNNK

SEQ ID NO: 94 - protein, 1359 aa, Pediococcus sp.
  REGION 1..1359: note = APG06015
MEKVPYNIGLDIGTSSIGFAATDNLNKPIRAKGKTVIGVRLFEEGKTAADRRGFRTTRRRLSRRKWRLRLLDEIFDKEMAKVDNTFFARLKESNLSPKDANKKYLGSLLFPEKKDFKFYEDYPTIYHLRYALMHEKRQFDIREVYLAMHHIIKYRGNFLNSAPMNSFKTQDFDFVAKFKKLNELFESIDAEHETKFDIENISKFRDIMLNQDIRKLDRKKQAAKILILDSTDKTAKKINNKIATAVANSALGYKFALDAILKLDVEESKDWSISLNDEEIDSILDNLTSDLDAERIEIIEILRDLYSHIALNEIVPNGQSLSKSMMDKYDKHHADLDVLKKVISNMDDRKKAKSLKNIYNQYVGKTNDKVLDKDEFYKQIQKNLDKSEDAMKIVNEIELDQFMPKQRTSQNGVIPHQLHQKELDEIIENQKQYYPFLAEPNPNEKRKPHAQFKLDELIAFKIPYYVGPLITKEEQQAQSGAKFAWMKRKQDGVITPWNFDEKVDRMASANEFIRRMTTKDTYLLGEDVLPDESLIYQKFKVLNELNNVKVNDKKLTVADKQDIFNDLFKKQKTVSVSKLQKYFVTEKHYLTEPTIKGLSDTKKFSNSLSTYIDFEKIFGNEILADQNKQNDLEKIIEWSTIFEDRKIFEDKLHEIEWLTEKQIKAIRRYRGWGRLSKKLLVDLRNNEGKSILDELWRTNDNFMQIQAREEFAKSIVEANQKLMNLGGAASVQNTVESTLEDAYTSPQNKKAIRQVIKVVEDIVKAVGYAPEKITIEFTRGADKNSRRTQNRQKQIMEVYKTAAKEIVDATLKGQLENEEKLTDKLYLYFTQLGKDIYSGETINIDQLNNYDIDHILPQAFIKDDSLDNRVLTSRDLNNGKSDSVPVKQFGANMKSFWMRLQAHGLISKRKLNNLMTDPDSIGKYTMQGFVRRQLVETSQVIKLTANILGAVYGENTDIVEIPAKLTHQMREKFNLYKVREVNDYHHAFDAYLTTFVGNYLFKRYPKLRPYFVYGDFKMTDNALKGMRRFNFLHDLKDDEVLVDNETGEVLWEGQKSIEELKKIYGYKFMLTTHEAYINNGAMYDQTVYPAKSNKKLIPSKNNRPTNIYGGFSGNKDAYLAIVKILGKKGDTYKVVGVPRRFSDELLNAYNDDYSEYLNKLHDVLVTQFTKKQRNKKTGKIIKKIENFEIVVGKVNYRQRIIDRNQSFMLGSSTYKYNTKQLVLTESSMKILSNFKHASDDNLNLVYDEILEKVNESFELYDKNGFRKKLNNNIDKFRKLPCKSIFEKNKLISVGKCEILFQILNGLHANATMGDLKGIGFSTPFGFMQDASGIKLNKDSMLLYQSPTGLFERKVKLSDL

SEQ ID NO: 95 - protein, 1488 aa, Weissella sp.
  REGION 1..1488: note = APG09344
MAKQKYTVGLDIGTNSVGWAVINKDFKLVSGKKHINDNGKQKRSRTNLWGVRLFDAADTAADRRLKRGMRRRIARRKERLNYLRGIFQADILAFDDSFFIRMDESFLQDDDKQATAFSYRDQSGAMQTRVVTEKEAVKYPLFNGKSGSGETYTDESAYYNQYPTIYHLRQRLIDNPAQADLRLVYLAMHHILKYRGHFVNQGQTFDLGNINIAGNLTSALDKLDEASSFKFGLADVDADQANAILKNKQWSASKKAYELNTLYEIIQDTVYRRENETQAVAYDSLTVKQQEKWLAEKQKQVKAFLTGIVGNTISPKDIFANKDYDRKQNEDFPEKIKYSNENFEEQIGELEKYLDETEVAAIVAGKDVYESLVLSNILTKSTLSGSMIEKYNVHGTQLKSLKSFSRKVSAEFYDKLFNVVKDEKGKPQIGVYAQYIDGVGNPAKRLAREDFYDALKKVFESEFKGLTFPAGEKGIDFTKTDLSADRMAFIREMNEAINLENYLPKQRQADNGAIPYQVHEHELIRIIENQKQYYPFLGDKVQVTYEDESGQTQVRSEYKIQVLFKFRIPYYVGTLAKNSGWVNEDGKKLVARNVAAKNSWVVRNSDERVTPWNFEQVINKEASSINFIERMTNFDTYLPNEKVLPKNSLLYQEFIVNNELISSGYYLNGRKEYFLPEQRQRIITRLFKRYRKVSAKQMLDFLKNEYQIKLDDDPKKLFGLDTFVKVPSYNGSLSTVVDLTNKMGISEDLIANYPERFEEIIKWQTIFEDKKILKKTIREVNHNKWSGMLTAEQVNKLSKRHYTGWGRLSQKLLDGVKTSQGRTIIESLREGICDNFMRLIEDEKIAEFIANAQVAGAKDGVLAYDLVDQLPGSPAIKKGIWQSLRVLQELEHYLGRDAIGKVVIEMSRDDESSRRTKARKQQLEEFYKKFKESTGSDVTAELKRELSEKDAKEIDDEKVFLYFLQNGKSMYSGDQLYLSRLADYQVDHIVPQTYIKDDSLDNKVLVTQRDNQNKGGDTPSHTVVTRMNSYWDMLAKNGQVSPRKLANLKKGTITLKQREGFINRQLVENRQIIKHVANILTNYYTGTDTLVLTPKSGLTSQLRSGLIYELNPAFDEAKALDRGKAYQVERYTTVKLHDRFVKNRKLNDYHHAHDAYLNAFVAQYVYQEHPEWKNAWVYGKYPRNGQADFGKWATQRKQKSLQLLSSMANDVWNLEDPDTMEKTILNRDETFEQMRQTLCYRNINIVKKLETQTGKFGDESVYKKGNKADHYSLGLKRKYPPQKYGGTKGAISAVTALVKDNSGRVIPVSISASDYDSYQNASDKLAWLLMRKKNIAEILVASLPKYTKYELPSGALRLLASYQEAQSAVELPMLNLGLMDDEAKVLNLYDQLAQFIADNKLFTDKKIALLKGEMRVAFEGLEEFKDKQKVIDELLGVTNGSNQGLQALNSIGLGTSNQRLKSGNTMTNGVTLINESVTGLYSTRTTYN

SEQ ID NO: 96 - protein, 1337 aa, Enterococcus sp.
  REGION 1..1337: note = APG07991
MKKDYVIGLDIGTNSVGWAVMTEDYQLVKKKMPIYGNTEKKKIKKNFWGVRLFEEGHTAEDRRLKRTARRRISRRRNRLRYLQAFFEEAMTALDENFFARLQESFLVPEDKKWHRHPIFAKLEDEVAYHETYPTIYHLRKKLADSSEQADLRLIYLALAHIVKYRGHFLIEGKLSTENISVKEQFQQFMIIYNQTFVNGESRLVSAPLPESVLIEEELTEKASRTKKSEKVLQQFPQEKANGLFGQFLKLMVGNKADFKKVFGLEEEAKITYASESYEEDLEGILAKVGDEYSDVFLAAKNVYDAVELSTILADSDKKSHAKLSSSMIVRFTEHQEDLKNFKRFIRENCPDEYDNLFKNEQKDGYAGYIAHAGKVSQLKFYQYVKKIIQDIAGAEYFLEKIAQENFLRKQRTFDNGVIPHQIHLAELQAIIHRQAAYYPFLKENQKKIEQLVTFRIPYYVGPLSKGDASTFAWLKRQSEEPIRPWNLQETVDLDQSATAFIERMTNFDTYLPSEKVLPKHSLLYEKFMVFNELTKISYTDDRGIKANFSGKEKEKIFDYLFKTRRKVKKKDIIQFYRNEYNTEIVTLSGLEEDQFNASFSTYQDLLKCGLTRAELDHPDNAEKLEDIIKILTIFEDRQRIRTQLSTFKGQFSEEVLKKLERKHYTGWGRLSKKLINGIYDKESGKTILDYLIKDDGVSKHYNRNFMQLINDSQLSFKNAIQKAQSSEHEETLSETVNELAGSPAIKKGIYQSLKIVDELVAIMGYAPKRIVVEMARENQTTSTGKRRSIQRLKIVEKAMAEIGSNLLKEQPTTNEQLRDTRLFLYYMQNGKDMYTGDELSLHRLSHYDIDHIIPQSFMKDDSLDNLVLVGSTENRGKSDDVPSKEVVKKMKAYWEKLYAAGLISQRKFQRLTKGEQGGLTLEDKAHFIQRQLVETRQITKNVAGILDQRYNAKSKEKKVQIITLKASLTSQFRSIFGLYKVREVNDYHHGQDAYLNCVVATTLLKVYPNLAPEFVYGEYPKFQAFKENKATAKAIIYTNLLRFFTEDEPRFTKDGEILWSNSYLKTIKKELNYHQMNIVKKVEVQKGGFSKESIKPKGPSNKLIPVKNGLDPQKYGGFDSPVVAYTVLFTHEKGKKPLIKQEILGITIMEKTRFEQNPILFLEEKGFLRPRVLMKLPKYTLYEFPEGRRRLLASAKEAQKGNQMVLPEHLLTLLYHAKQCLLPNQSESLAYVEQHQPEFQEILERVVDFAEVHTLAKSKVQQIVKLFEANQTADVKEIAASFIQLMQFNAMGAPSTFKFFQKDIERARYTSIKEIFDATIIYQSTTGLYETRRKVVD

SEQ ID NO: 97 - protein, 1340 aa, Enterococcus sp.
  REGION 1..1340: note = APG01868
MKKEYTIGLDIGTNSVGWSVLTDDYRLVSKKMKVAGNTEKSSTKKNFWGVRLFDEGQTAEARRSKRTARRRLARRRQRILELQKIFAPEILKIDEHFFARLNESFLVPDEKKQSRHPVFATIKQEKSYHQTYPTIYHLRQALADSSEKADIRLVYLAMAHLLKYRGHFLIEGELNTENSSVTETFRQFLSTYNQQFSEAGDKQTEKLDEAVDCSFVFTEKMSKTKKAETLLKYFPHEKSNGYLSQFIKLMVGNQGNFKNVFGLEEEAKLQFSKETYEEDLQELLEKIGDDYIDLFVQAKNVYDAVLLSEILSDSTKNTRAKLSAGMIRRYDAHKEDLVLLKRFVKENLPKKYRAFFGDNSVNGYAGYIEGHATQEDFYKFVKKELTGIRGSEVFLTKIEQENFLRKQRTFDNGVIPHQIHLTELRAIIANQKKHYPFLKEEQEKLESLLTFKIPYYVGPLAKKQENSPFAWLIRKSEEKIKPWNLPEIVDMEDSAVRFIERMINTDMYMPHNKVLPKNSLLYQKFSIYNELTKVRYQDERGQMNYFSSIEKKEIFHELFEKNRKVTKKDLQEFLYLKYDIKHAELSGIEKAFNASYTTYHDFLTMSENKREMKQWLEDPELASMFEEIIKTLTVFEDREMIKTRLSHHEATLGKHIIKKLTKKHYTGWGRLSKELIQGIRDKQSNKTILDYLINDDDFPHHRNRNFMQLINDDSLSFKKEIKKAQMITDTENLEEIVKELTGSPAIKKGILQSLKIVDEIVGIMGYEPANIVVEMARENQTTGRGLKSSRPRLKALEESLKDFGSQLLKEYPTDNSSLQKDRLYLYYLQNGRDMYTGAPLDIHRLSDYDIDHIIPRSFTTDNSIDNKVLVSSKENRLKKDDVPSEKVVKKMRSFWYDLYSSKLISKRKLDNLTKIKLTEEDKAGFIKRQLVETRQITKHVAGILHHRFNKAEDTNEPIRKVRIITLKSALVSQFRNRFGIYKVREINEYHHAHDAYLNGVIALALLKKYPQLAPEFVYGEYLKFNAHKANKATVKKEFYSNIMKFFESDTPVCDENGEIFWDKSKSIAQVKKVINHHHMNIVKKTEIQKGGFSKETVEPKKDSSKLLPRKNNWDPAKYGGLGSPNVAYTVAFTYEKGKARKRTNALEGITIMEREAFEQSPVLFLKNKGYEQAEIEMKLPKYALFELENGRKRMVASNKEAQKANSFLLPEHLVTLLYHAKQYDEISHKESFDYVNEHHKEFSEVFARVLEFAGKYTLAEKNIEKLEKIYKENQTDDLAKLASSFVNLMQFNAMGAPADFKFFDVTIPRKRYTSLTEIWQSTIIHQSITGLYETRIRMGK

SEQ ID NO: 98 - protein, 1327 aa, Enterococcus sp.
  REGION 1..1327: note = APG02998
MKKNYTIGLDIGTASVGWAVLTEDYDLVKRKMKISGNTQKKAVKKNFWGVRLFEQGETAEGRRLKRTTRRRIARRRQRIQYLRTIFDEAMNQVDANFFARLDESFSITDEKENERHPIFGNVAEEVAYHEQFRTIYRLREVLANSSEQADLRLIYLALAHIIKFRGHFLIEGELNTENSSVSGTFEQFIKVYNETFNVEKVLELTVDLDEIAKQKVSRMKRAELILSLFPEEKSTGDFAQFIKMIVGNQGNVKKTFSLNEDAKIQFSKEEYEENLETLLAEIGEDFRGVFDAAKSVYDAISLANILKVTDAATRAKLSSSMVARFKEHKEDLKALKQFVRDNLPDEYDDLFKNKKVAGYAGYIDGDATQEEFYKYLKKALAKTTGAEYFLAKIEQEDFLRKQRTFDNGVIPYQLHLEELKAIIRNQKPYYPFLDEEKISQLMTFRIPYYVGPLAQGQGNFAWLTRKESGKITPWNLNEKVDIEKSATDFVERMTNNDSYLPMEKVLPKHSLLYEKFTVYNELTKVRYMDDNGRVQNFSSKEKQQIVNDLFKQQRKVKKEILEAFIKNEYGIENPKVEGIEKAFNASLGTYHDLVKLGIRPALFEQPEYEQQFEQIVKILTVFEDRKMRRKQLEQFSDLLTEDEQKQLERKHYKGWGRLSAKLIHGIVDQKTQKTILDYLIDDDDLPRNRNRNFMQLINDENLSFKEEIEKIAFDNDKSTEEIVQELAGSPAIKKGILQSLKIVEEIIEIMGELPTNIVVEMARENQTTAQGNRASQARMKYLEESIKKLGSSILEDEPISKDANLLRNDRLFLYYLQNGRDMYTGDELDINNLSSYDIDHIIPQSFVKDDSIDNRVLTTQRINRGKSNTVPAESVVKDMRATWERLYASNLISKKKLNNLMKAVNGGLTEEDKAYFIQRQLVETRQITKNVAQILHQKYNNEQSSEKPVRVVTLKSALASQFRKDFSLYKIRELNDYHHAQDAYLNGVIAQALLKVYPKLEPEFVYGEYQKVSIRALNKATAKKETYSNIMKFFTNDEVLTNKETGEVLWNRQRDIKTIKKVMNYHQMNIVKKVEIQTGRFTKESIQPKGPSKKLIARKNNWAPVNYGGFDSPTVAYSVIITHEKGKAAKVVQQLVGIKILERQAFEQNEVAFLEGKGFIHPKVQLKLPKYSLYQFADGRRRLLASADEAQKGNQMVLPTELIELLYHAKHVNDSSGESLTYLENHRTKFAELLEVILQFTNRYVGAEDRQKTVRDLYEKNQDADMKELAPSFVQLLQLNKQGAPASFKFFGETIERSRYKNMTELNKATFINQSITGLYETQRRLV

SEQ ID NO: 99 - protein, 1150 aa, synthetic construct
  REGION 1..1150: note = APG09298
MYSIGLDLGISSVGWSVIDEETGKIVDLGIRLFSAKNSEKNLERRTSRGARRLIRRKTNRLKDAKKLLEAIGFYEDKALKNVCPYQLRVKGLTEGLTKGELYKVVLHIVKKRGISYLDEDDAEAAKESQDYKEQVRKNAQLLTKYTPGQIQLQRLKENNRVKTGINGQGHYQLNVFKVSAYADELATILKTQQALYPNELTDDWIALFVQPGIAENAGLIYRKRPYYHGPGNEANNSPYGRWSDFQKTGQPAANIFDKLIGKDFQGELRASGLSLSAQQYNLLNDLTNLKIDGEVSLSPTQKEFILTELMTKEFARFGVNDIAKLLGVKKEQLSGWRLDKKGKPEIHTLKGYRNWRKIFAESGIDLATLPTETIDCLAKVLTLNTEREGVENTLAFELPELAEPVKLLVLDRYKELSQSVSTQAWHRFSLKTLHLLIPELIKSTSEQNTLLEQFQLKADVRKRYSDYKKLPTKEVLTEIYNPTVNKTVSQAFKVMDALLEKYGKDQIHYITVEMPRDDNEEEERKRIKELQTKNSQRKNDSQQYFLQKSGWSQEKFQATIHKNRRFLAKLLYYFEQDGVCAYTGNPISPELLVSDSTEIDHIIPISISLDDSINNKVLVLSHANQVKGQQTPYDARMAGAFNKINGKFSNWDEYQKWVESCPFSRKKVNNLLETRNIFDSEQVQKFLSRNLNDTRYASRLVLNTLQSFFENQDTIVRVVNGSFTHTLRKKWGADLDKTRETHHHHAVDATLCAVTPFVKVSRYHYAVNEETGEKFMREIDVETGEILDEIPYREYKKAKHYERKTYQVKWSNFREQLKPITIHPKIKFSHQVDRKANRKLSDATIYSVREKTEVKTLKSGKEKITTDEYTIGKIKDIYTVDGWEAFKKKQDKLLMKEFDEKTYELLVTIAATTPDFQEVEEKNGKVKRVKRSPFAVYCEENGIPAIRKYAKKNNGPVIRSLKYYDGKLNKHINITKDEKGRPVEQTKNGRKVTLQSLKPYRYDIYQDLETKAYYTVQLYYSDLRFVEGEYGITEKEYMKKVAEQTKGQVVRFCFSLQKNDGLEIEWKDSQRYDVRFYNFQSANSINFKGLEQEMIPAENQFKQKPYNNGAINLNIAKYGKEGNKLRKFNTDILGKKHHLSYEKEPKNIIK

SEQ ID NO: 100 - protein, 1150 aa, synthetic construct
  REGION 1..1150: note = APG06251
MYSIGLDLGISSVGWSVIDEETGKIVDLGIRLFSAKNSEKNLERRTSRGARRLIRRKTNRLKDAKKLLEAIGFYEDKALKNVCPYQLRVKGLTEGLTKGELYKVVLHIVKKRGISYLDEDDAEAAKESQDYKEQVRKNAQLLTKYTPGQIQLQRLKENNRVKTGINGQGHYQLNVFKVSAYADELATILKTQQALYPNELTDDWIALFVQPGIAENAGLIYRKRPYYHGPGNEANNSPYGRWSDFQKTGQPAANIFDKLIGKDFQGELRASGLSLSAQQYNLLNDLTNLKIDGEVSLSPTQKEFILTELMTKEFARFGVNDIAKLLGVKKEQLSGWRLDKKGKPEIHTLKGYRNWRKIFAESGIDLATLPTETIDCLAKVLTLNTEREGVENTLAFELPELAEPVKLLVLDRYKELSQSVSTQAWHRFSLKTLHLLIPELIKSTSEQNTLLEQFQLKADVRKRYSDYKKLPTKEVLTEIYNPTVNKTVSQAFKVMDALLEKYGKDQIHYITVEMPRDDNEEEERKRIKELQTKNSQRKNDSQQYFLQKSGWSQEKFQATIHKNRRFLAKLLYYFEQDGVCAYTGNPISPELLVSDSTEIDHIIPISISLDDSINNKVLVLSHANQVKGQQTPYDARMAGAFNKINGKFSNWDEYQKWVESCPFSRKKVNNLLETRNIFDSEQVQKFLSRNLNDTRYASRLVLNTLQSFFENQDTIVRVVNGSFTHTLRKKWGADLDKTRETHHHHAIDASLCAVTPFVKVSRYHYAVNEETGEKFMREIDVETGEILDEIPYREYKKAKHYERKTYQVKWSNFREQLKPITIHPKIKFSHQVDRKANRKLSDATIYSVREKTEVKTLKSGKEKITTDEYTIGKIKDIYTVDGWEAFKKKQDKLLMKEFDEKTYELLVTIAATTPDFQEVEEKNGKVKRVKRSPFAVYCEENGIPAIRKYAKKNNGPVIRSLKYYDGKLNKHINITKDEKGRPVEQTKNGRKVTLQSLKPYRYDIYQDLETKAYYTVQLYYSDLRFVEGEYGITEKEYMKKVAEQTKGQVVRFCFSLQKNDGLEIEWKDSQRYDVRFYNFQSANSINFKGLEQEMIPAENQFKQKPYNNGAINLNIAKYGKEGNKLRKFNTDILGKKHHLSYEKEPKNIIK

SEQ ID NO: 101 - protein, 1150 aa, synthetic construct
  REGION 1..1150: note = APG03066
MYSIGLDLGISSVGWSVIDEETGKIVDLGIRLFSAKNSDNNEGRRSKRGSRRLKRRRIHRLERVKLLLTEYDLINKEQIPTVCPYQLRVKGLTEGLTKGELYKVVLHIVKKRGISYLDEDDAEAAKESQDYKEQVRKNAQLLTKYTPGQIQLQRLKENNRVKTGINGQGHYQLNVFKVSAYADELATILKTQQALYPNELTDDWIALFVQPGIAENAGLIYRKRPYYHGPGNEANNSPYGRWSDFQKTGQPAANIFDKLIGKDFQGELRASGLSLSAQQYNLLNDLNNLIIDGEVSLSPTQKEFILTELMTKEFARFGVNDIAKLLGVKKEQLSGWRLDKKGKPEIHTLKGYRNWRKIFAESGIDLATLPTETIDCLAKVLTLNTEREGVENTLAFELPELAEPVKLLVLDRYKELSQSVSTQAWHRLSLKCIHLINEELIKSTSEQNTLLEQFQLKADVRKRYSDYKKLPTKEVLTEIYNPTVNKTVSQAFKVMDALLEKYGKDQIHYITVEMPRDDNEEEERKRIKELQTKNSQRKNDSQQYFLQKSGWSQEKFQATIHKNRRFLAKLLYYFEQDGVCAYTGNPISPELLVSDSTEVDHIIPRSISLDDSINNKVLVLSHANQVKGQQTPYDARMAGAFNKINGKFSNWDEYQKWVESCPFSRKKVNNLLETRNIFDSEQVQKFLSRNLVDTRYATRLVLNTLQSFFENQDTIVRVVNGSFTHTLRKKWGADLDKTRETHHHHAVDATLCAVTPFVKVSRYHYAVNEETGEKFMREIDVETGEILDEIPYREYKKAKHYERKTYQVKWSNFREQLKPITIHPKIKFSHRVDKKPNRQLINDTLYSTRMKDEVKTLKSGKEKITTDEYTIGKITDIYTVDGWEAFKKKQDKLLMKEFDEKTYELLVTIAATTPDFQEVEEKNGKVKRVKRSPFAVYCEENGIPAIRKYAKKNNGPVIRSLKYYDGKLNKHINITKDEKGRPVEQTKNGRKVTLQSLKPYRYDIYQDLETKAYYTVQLYYSDLRFVEGEYGITEKEYMKKVAEQTKGQVVRFCFSLQKNDGLEIEWKDSQRYDVRFYNFQSANSINFKGLEQEMIPAENQFKQKPYNNGAINLNIAKYGKEGNKLRKFTTDVLGKKHHLSYEKEPKNIIK

SEQ ID NO: 102 - protein, 1150 aa, synthetic construct
  REGION 1..1150: note = APG01560
MYSIGLDLGISSVGWSVIDEETGKIVDLGARLFSAKNSEKNLERRTSRGARRLIRRKTNRLKDAKKLLEAIGFYEDKALKNVCPYQLRVKGLTEGLTKGELYKVVLHIVKKRGISYLDEDDAEAAKESQDYKEQVRKNAQLLTKYTPGQIQLQRLKENNRVKTGINGQGHYQLNVFKVSAYADELATILKTQQALYPNELTDDWIALFVQPGIAENAGLIYRKRPYYHGPGNEANNSPYGRWSDFQKTGQPAANIFDKLIGKDFQGELRASGLSLSAQQYNLLNDLTNLKIDGEVSLSPDQKEFILTELMTKEFARFGVNDIAKLLGVKKEQLSGWRLDKKGKPEIHTLKGYRNWRKIFAEVGIDLATLPTETIDCLAKVLTLNTEREGVENTLAFELPELAEPVKTLVLDRYKELSQSLSTQAWHRFSLKTLHLLIPELIKSTSEQNTLLEQFQLKAAVRKRYSDYKKLPTKEVLVEIYNPTVNKTVSQAFKVMDALLEKYGKDQIHYITVEMPRDDNEEEERKRIKELQTKNSQRKNDSQQYFLQKSGWSQEKFQATIHKNRRFLAKLLYYFEQDGVCAYTGNPISPELLVSDSTEIDHIIPISISLDDSINNKVLVLSHANQVKGQQTPYDARMAGAFNKINGKFSNWDEYQKWVESKPFSRKKVNNLLETRNIFDSEQVQKFLSRNLNDTRYASRLVLNTLQSFFENQDTIVRVVNGSFTHTLRKKWGADLDKTRETHHHHAVDATLCAVTPFVKVSRYHYAVNEETGEKFMREIDVETGEILDEIPYREYKKAKHYERKTYQVKWSNFREQLKPITIHPKIKFSHQVDRKANRKLSDATIYSVREKTEVKTLKSGKEKITTDEYTIGKIKDIYTVDGWEAFKKKQDKLLMKEFDEKTYELLVTIAATTPDFQEVEEKNGKVKRVKRSPFAVYCEENGIPAIRKYAKKNNGPVIRSLKYYDGKLNKHINITKDEKGRPVEQTKNGRKVTLQSLKPYRYDIYQDLETKAYYTVQLYYSDLRFVEGEYGITEKEYMKKVAEQTKGQVVRFCFSLQKNDGLEIEWKDSQRYDVRFYNFQSANSINFKGLEQEMIPAENQFKQKPYNNGAINLNIAKYGKEGRKLRKFNTDILGKKHHLSYEKEPKNIIK

SEQ ID NO: 103 - protein, 1150 aa, synthetic construct
  REGION 1..1150: note = APG02777
MYSIGLDLGISSVGWSVIDEETGKIVDLGARLFSAKNSEKNLERRTSRGARRLIRRKTNRLKDAKKLLEAIGFYEDKALKNVCPYQLRVKGLTEGLTKGELYKVVLHIVKKRGISYLDEDDAEAAKESQDYKEQVRKNAQLLTKYTPGQIQLQRLKENNRVKTGINGQGHYQLNVFKATAYADEIASLIKSQQAIYPNEISDDWLALFAQPGIAENAGLIYRKRPYYHGPGNEANNSPYGRWSDFQKTGQPAANIFDKLIGKDFQGELRASGLSLSAQQYNLLNDLTNLKIDGEVSLSPDQKEFLISEIMSKEFARFGANDLAKIIGAKKEQLSGWRLDKKGKPEIHTLKGYRNWRKIFAEVGLDIASIPSESLDCIAKVLTLNTEREGAENSIAFEIPEIAEPAKTIAIDRYKEITQTLSTQAWHRFSLKTLHLLIPELIKSTSEQNTLLEQFQLKAAVRKRYSDYKKLPTKEVLVEIYNPTVNKTVSQAFKVMDALLEKYGKDQIHYITVEMPRDDNEEEERKRIKELQTKNSQRKNDSQQYFLQKSGWSQEKFQATIHKNRRFLAKLLYYFEQDGVCAYTGNPISPELLVSDSTEIDHIIPISISLDDSINNKVLVLSHANQVKGQQTPYDARMAGAFNKINGKFSNWDEYQKWVESKPFSRKKVNNLLETRNIFDSEQVQKFLSRNLNDTRYASRLVLNTLQSFFENQDTIVRVVNGSFTHTLRKKWGADLDKTRETHHHHAVDATLCAVTPFVKVSRYHYAVNEETGEKFMREIDVETGEILDEIPYREYKKAKHYERKTYQVKWSNFREQLKPITIHPKIKFSHQVDRKANRKLSDATIYSVREKTEVKTLKSGKEKITTDEYTIGKIKDIYTVDGWEAFKKKQDKLLMKEFDEKTYELLVTIAATTPDFQEVEEKNGKVKRVKRSPFAVYCEENGIPAIRKYAKKNNGPVIRSLKYYDGKLNKHINITKDEKGRPVEQTKNGRKVTLQSLKPYRYDIYQDLETKAYYTVQLYYSDLRFVEGEYGITEKEYMKKVAEQTKGQVVRFCFSLQKNDGLEIEWKDSQRYDVRFYNFQSANSINFKGLEQEMIPAENQFKQKPYNNGAINLNIAKYGKEGRKLRKFNTDILGKKHHLSYEKEPKNIIK

SEQ ID NO: 104 - protein, 1150 aa, synthetic construct
  REGION 1..1150: note = APG05761
MYSIGLDLGISSVGWSVIDEETGKIVDLGVRLFSAKNSEKNLERRTSRGARRLIRRKTNRLKDAKKLLEAIGFYEDKALKNVCPYQLRVKGLTEGLTKGELYKVVLHIVKKRGISYLDEDDAEAAKESQDYKEQVRKNAQLLTKYTPGQIQLQRLKENNRVKTGINGQGHYQLNVFKASAYADELATLLKTQQALYPNEITDDWLALFVQPGIAENAGLIYRKRPYYHGPGNEANNSPYGRWSDFQKTGQPAANIFDKLIGKDFQGELRASGLSLSAQQYNLLNDLTNLKIDGEVSLSPEQKEFLLTELMTKEFARFGVNDIAKLLGAKKEQLSGWRLDKKGKPEIHTLKGYRNWRKIFAEAGIDIASLPTETLDCLAKVLTLNTEREGVENSLAFELPELAEPVKSLVLDHYKELSQSISTQAWHRFSLKTLHLLIPELIKSTSEQNTLLEQFQLKAGVRKRYSDYKKLPTKEVLAEIYNPTVNKTVSQAFKVMDALLEKYGKDQIHYITVEMPRDDNEEEERKRIKELQTKNSQRKNDSQQYFLQKSGWSQEKFQATIHKNRRFLAKLLYYFEQDGVCAYTGNPISPELLVSDSTEIDHIIPISISLDDSINNKVLVLSHANQVKGQQTPYDARMAGAFNKINGKFSNWDEYQKWVESRPFSRKKVNNLLETRNIFDSEQVQKFLSRNLNDTRYASRLVLNTLQSFFENQDTIVRVVNGSFTHTLRKKWGADLDKTRETHHHHAVDATLCAVTPFVKVSRYHYAVNEETGEKFMREIDVETGEILDEIPYREYKKAKHYERKTYQVKWSNFREQLKPITIHPKIKFSHQVDRKANRKLSDATIYSVREKTEVKTLKSGKEKITTDEYTIGKIKDIYTVDGWEAFKKKQDKLLMKEFDEKTYELLVTIAATTPDFQEVEEKNGKVKRVKRSPFAVYCEENGIPAIRKYAKKNNGPVIRSLKYYDGKLNKHINITKDEKGRPVEQTKNGRKVTLQSLKPYRYDIYQDLETKAYYTVQLYYSDLRFVEGEYGITEKEYMKKVAEQTKGQVVRFCFSLQKNDGLEIEWKDSQRYDVRFYNFQSANSINFKGLEQEMIPAENQFKQKPYNNGAINLNIAKYGKEGKKLRKFNTDILGKKHHLSYEKEPKNIIK

SEQ ID NO: 105 - protein, 1150 aa, synthetic construct
  REGION 1..1150: note = APG02479
MYSIGLDLGISSVGWSVIDEETGKIVDLGVRLFSAKNSEKNLERRTSRGARRLIRRKTNRLKDAKKLLEAIGFYEDKALKNVCPYQLRVKGLTEGLTKGELYKVVLHIVKKRGISYLDEDDAEAAKESQDYKEQVRKNAQLLTKYTPGQIQLQRLKENNRVKTGINGQGHYQLNVFKVTAYADELATILKTQQAIYPNEITDDWIAIFVQPGIAENAGLIYRKRPYYHGPGNEANNSPYGRWSDFQKTGQPAANIFDKLIGKDFQGELRASGLSLSAQQYNLLNDLTNLKIDGEVSLSPEQKEFILTELMTKEFARFGANDIAKILGAKKEQLSGWRLDKKGKPEIHTLKGYRNWRKIFAEAGIDIATLPTETIDCLAKVLTLNTEREGAENTLAFELPELAEPAKTLVLDHYKELTQSISTQAWHRFSLKTLHLLIPELIKSTSEQNTLLEQFQLKAGVRKRYSDYKKLPTKEVLAEIYNPTVNKTVSQAFKVMDALLEKYGKDQIHYITVEMPRDDNEEEERKRIKELQTKNSQRKNDSQQYFLQKSGWSQEKFQATIHKNRRFLAKLLYYFEQDGVCAYTGNPISPELLVSDSTEIDHIIPISISLDDSINNKVLVLSHANQVKGQQTPYDARMAGAFNKINGKFSNWDEYQKWVESRPFSRKKVNNLLETRNIFDSEQVQKFLSRNLNDTRYASRLVLNTLQSFFENQDTIVRVVNGSFTHTLRKKWGADLDKTRETHHHHAVDATLCAVTPFVKVSRYHYAVNEETGEKFMREIDVETGEILDEIPYREYKKAKHYERKTYQVKWSNFREQLKPITIHPKIKFSHQVDRKANRKLSDATIYSVREKTEVKTLKSGKEKITTDEYTIGKIKDIYTVDGWEAFKKKQDKLLMKEFDEKTYELLVTIAATTPDFQEVEEKNGKVKRVKRSPFAVYCEENGIPAIRKYAKKNNGPVIRSLKYYDGKLNKHINITKDEKGRPVEQTKNGRKVTLQSLKPYRYDIYQDLETKAYYTVQLYYSDLRFVEGEYGITEKEYMKKVAEQTKGQVVRFCFSLQKNDGLEIEWKDSQRYDVRFYNFQSANSINFKGLEQEMIPAENQFKQKPYNNGAINLNIAKYGKEGKKLRKFNTDILGKKHHLSYEKEPKNIIK

SEQ ID NO: 106 - protein, 1150 aa, synthetic construct
  REGION 1..1150: note = APG08385
MYSIGLDLGISSVGWSVIDEETGKIVDLGVRLFSAKNSEKNLERRTSRGARRLIRRKTNRLKDAKKLLEAIGFYEDKALKNVCPYQLRVKGLTEGLTKGELYKVVLHIVKKRGISYLDEDDAEAAKESQDYKEQVRKNAQLLTKYTPGQIQLQRLKENNRVKTGINGQGHYQLNVFKVSAYADELASILKTQQALYPNEITDDWIAIFVQPGIAENAGLIYRKRPYYHGPGNEANNSPYGRWSDFQKTGQPAANIFDKLIGKDFQGELRASGLSLSAQQYNLLNDLTNLKIDGEVSLSPEQKEFIITELMTKEFARFGVNDLAKILGVKKEQLSGWRLDKKGKPEIHTLKGYRNWRKIFAEAGLDLATIPSETLDCLAKVLTLNTEREGAENTLAFELPELAEPVKTLVLDHYKELSQSISTQAWHRFSLKTLHLLIPELIKSTSEQNTLLEQFQLKAGVRKRYSDYKKLPTKEVLAEIYNPTVNKTVSQAFKVMDALLEKYGKDQIHYITVEMPRDDNEEEERKRIKELQTKNSQRKNDSQQYFLQKSGWSQEKFQATIHKNRRFLAKLLYYFEQDGVCAYTGNPISPELLVSDSTEIDHIIPISISLDDSINNKVLVLSHANQVKGQQTPYDARMAGAFNKINGKFSNWDEYQKWVESRPFSRKKVNNLLETRNIFDSEQVQKFLSRNLNDTRYASRLVLNTLQSFFENQDTIVRVVNGSFTHTLRKKWGADLDKTRETHHHHAVDATLCAVTPFVKVSRYHYAVNEETGEKFMREIDVETGEILDEIPYREYKKAKHYERKTYQVKWSNFREQLKPITIHPKIKFSHQVDRKANRKLSDATIYSVREKTEVKTLKSGKEKITTDEYTIGKIKDIYTVDGWEAFKKKQDKLLMKEFDEKTYELLVTIAATTPDFQEVEEKNGKVKRVKRSPFAVYCEENGIPAIRKYAKKNNGPVIRSLKYYDGKLNKHINITKDEKGRPVEQTKNGRKVTLQSLKPYRYDIYQDLETKAYYTVQLYYSDLRFVEGEYGITEKEYMKKVAEQTKGQVVRFCFSLQKNDGLEIEWKDSQRYDVRFYNFQSANSINFKGLEQEMIPAENQFKQKPYNNGAINLNIAKYGKEGKKLRKFNTDILGKKHHLSYEKEPKNIIK

SEQ ID NO: 107 - protein, 1150 aa, synthetic construct
  REGION 1..1150: note = APG09217
MYSIGLDLGISSVGWSVIDEETGKIVDLGVRLFSAKNSEKNLERRTSRGARRLIRRKTNRLKDAKKLLEAIGFYEDKALKNVCPYQLRVKGLTEGLTKGELYKVVLHIVKKRGISYLDEDDAEAAKESQDYKEQVRKNAQLLTKYTPGQIQLQRLKENNRVKTGINGQGHYQLNVFKVTAYADEIASILKTQQAIYPNEITDDWIALFVQPGIAENAGLIYRKRPYYHGPGNEANNSPYGRWSDFQKTGQPAANIFDKLIGKDFQGELRASGLSLSAQQYNLLNDLTNLKIDGEVSLSPEQKEFIISELMTKEFARFGVNDLAKIIGVKKEQLSGWRLDKKGKPEIHTLKGYRNWRKIFAEAGIDLATLPSETLDCLAKVLTLNTEREGAENTLAFELPELAEPVKSLVLDHYKELSQTISTQAWHRFSLKTLHLLIPELIKSTSEQNTLLEQFQLKAGVRKRYSDYKKLPTKEVLAEIYNPTVNKTVSQAFKVMDALLEKYGKDQIHYITVEMPRDDNEEEERKRIKELQTKNSQRKNDSQQYFLQKSGWSQEKFQATIHKNRRFLAKLLYYFEQDGVCAYTGNPISPELLVSDSTEIDHIIPISISLDDSINNKVLVLSHANQVKGQQTPYDARMAGAFNKINGKFSNWDEYQKWVESRPFSRKKVNNLLETRNIFDSEQVQKFLSRNLNDTRYASRLVLNTLQSFFENQDTIVRVVNGSFTHTLRKKWGADLDKTRETHHHHAVDATLCAVTPFVKVSRYHYAVNEETGEKFMREIDVETGEILDEIPYREYKKAKHYERKTYQVKWSNFREQLKPITIHPKIKFSHQVDRKANRKLSDATIYSVREKTEVKTLKSGKEKITTDEYTIGKIKDIYTVDGWEAFKKKQDKLLMKEFDEKTYELLVTIAATTPDFQEVEEKNGKVKRVKRSPFAVYCEENGIPAIRKYAKKNNGPVIRSLKYYDGKLNKHINITKDEKGRPVEQTKNGRKVTLQSLKPYRYDIYQDLETKAYYTVQLYYSDLRFVEGEYGITEKEYMKKVAEQTKGQVVRFCFSLQKNDGLEIEWKDSQRYDVRFYNFQSANSINFKGLEQEMIPAENQFKQKPYNNGAINLNIAKYGKEGKKLRKFNTDILGKKHHLSYEKEPKNIIK

SEQ ID NO: 108 - protein, 1150 aa, synthetic construct
  REGION 1..1150: note = APG06657
MYSIGLDLGISSVGWSVIDEETGKIVDLGVRLFSAKNSEKNLERRTSRGARRLIRRKTNRLKDAKKLLEAIGFYEDKALKNVCPYQLRVKGLTEGLTKGELYKVVLHIVKKRGISYLDEDDAEAAKESQDYKEQVRKNAQLLTKYTPGQIQLQRLKENNRVKTGINGQGHYQLNVFKASAYADEIASLLKTQQAIYPNELTDDWLALFVQPGIAENAGLIYRKRPYYHGPGNEANNSPYGRWSDFQKTGQPAANIFDKLIGKDFQGELRASGLSLSAQQYNLLNDLTNLKIDGEVSLSPEQKEFIISELMTKEFARFGANDIAKLLGVKKEQLSGWRLDKKGKPEIHTLKGYRNWRKIFAEAGLDLATLPTETIDCLAKVLTLNTEREGAENSLAFELPELAEPVKSLALDHYKELTQSISTQAWHRFSLKTLHLLIPELIKSTSEQNTLLEQFQLKAGVRKRYSDYKKLPTKEVLAEIYNPTVNKTVSQAFKVMDALLEKYGKDQIHYITVEMPRDDNEEEERKRIKELQTKNSQRKNDSQQYFLQKSGWSQEKFQATIHKNRRFLAKLLYYFEQDGVCAYTGNPISPELLVSDSTEIDHIIPISISLDDSINNKVLVLSHANQVKGQQTPYDARMAGAFNKINGKFSNWDEYQKWVESRPFSRKKVNNLLETRNIFDSEQVQKFLSRNLNDTRYASRLVLNTLQSFFENQDTIVRVVNGSFTHTLRKKWGADLDKTRETHHHHAVDATLCAVTPFVKVSRYHYAVNEETGEKFMREIDVETGEILDEIPYREYKKAKHYERKTYQVKWSNFREQLKPITIHPKIKFSHQVDRKANRKLSDATIYSVREKTEVKTLKSGKEKITTDEYTIGKIKDIYTVDGWEAFKKKQDKLLMKEFDEKTYELLVTIAATTPDFQEVEEKNGKVKRVKRSPFAVYCEENGIPAIRKYAKKNNGPVIRSLKYYDGKLNKHINITKDEKGRPVEQTKNGRKVTLQSLKPYRYDIYQDLETKAYYTVQLYYSDLRFVEGEYGITEKEYMKKVAEQTKGQVVRFCFSLQKNDGLEIEWKDSQRYDVRFYNFQSANSINFKGLEQEMIPAENQFKQKPYNNGAINLNIAKYGKEGKKLRKFNTDILGKKHHLSYEKEPKNIIK

SEQ ID NO: 109 - protein, 1055 aa, Brevundimonas vesicularis
  REGION 1..1055: note = LPG10134
MTTRLGLDVGTNSIGWALIDKDSARIIDLGSRIFSDGRDPKSGASLAVDRREARAARRRRDRYLGRRSAFLETLIQHGLMPERADDAKLVAAKDPYALRARALDEPLEPHEIGRALFHLNQRRGFKSNRKAERGRKENEDGKIESGAKALDTAMTVAKARTLGEFLHTQNAKRVRMGGDNQTYDFYPQRRHVETEFAVLWAAQKAHHPALLTDAAEEALHRILFFQRDLKDQEVGLCTFAGWNDVPENERRLPKTHPLFQERRLYEEVNHLKIVSPGAKDRDLTLAERDAVLLKLRDTRKSSFSALGKLIKLGEGERFNKESETRKDLLGDEVRAELADKKRFGARWTFFDIAEQLKIIDRIQNEADPEVLLDWLKAEYGLDDASAVAVSKARLPEGYGRFGETATRRLIDALKAQVVTYDKAALAAGFHHSDRRTGEVWERLPYYGQILTTEIAPGKAEHGDDNERRFGKITNPTVHIELRQLEKLVNAVITVHGRPDEIVVELARELKLNEEDRKKHDARIRRDTAAAIARGEKLEAEGIPDTGANRMAMRMWEDLNPGNPLDRRCPYCAEVIGIRALFSGEADIDHIIPYSQSLDDSAGNKVVAHRHCNRAKGNKTPYERWGHDEARWEIISAQVARMHRSKQWRFGPEARERLEKEGGFIARQLTDTQYLSRATAKYLSSLYTPDEGRRVYALPGRMTAMLRRLWGLNSLLPDHNFVENEHSNAPKNRLDHRHHTIDGAVAAVTDASLMQRIATVAARAEENELDRLFEDLAPPWPTFREELKERLARVTVSHKPDHGRKGRPDRTRDVTAGRLHNDTAYGFTGQVAADGKTPIVVHRVPFASLKPADILDPTRIPDTALREALFEATRDLTGKSYDQAMARFAKQHPVFKGIRRVRVREALNVIPIRSKEGRPYKAYKGDSNARYDVWRLPNGKWVTDIVSMFDAHSPEASDRRPHPAAKKVLSLRQNDMLAIERDGGEAQIVRVVKFSRSGLILAGQNEAGPLKARDAAPNETDPFRYISASASSLKRDNARQIRIDPLGRVFDPGPRD

SEQ ID NO: 110 - protein, 1079 aa, Bacillus endophyticus
  source 1..1079: note = Bacillus_I endophyticus
  REGION 1..1079: note = LPG10136
MKDLDYRIGLDIGTNSIGWSIIKLQFNDTTQRYEKSGIIDLGVRMFDKAEIPKTGASLSEPRRLARSSRRRLKRKSERKQIIRRLLVDFDILSQEELDHLFPLPKDSVDIWDIRLEGLERVLNRFEWARLLLHLAQRRGFKSNRKSQRNETETGKMLASIYDNKNRLSAYRTVGEMWMKDKKFAQYDKRRNSPDEYIFNVSRDDLEKEIMTLFEAQRKFLSEYASEQLQEAYLKVWSHQLPFASGNDILKKVGHCSLEKNERRIPKATYTFQYFAALDKINNLRLGDYVQPLRQEQQKLLLKKMFERIDFVKKKSIPIIKYSDLRKWLKLDESICFKGLTYNPNEKLSKVEKKEFINLKPYYEMKKVISKHYEKHENIYEVADFDTFGYALTIYKNDQDIRSYLRNSNNIGKKVYDEALIEDLLNLSYTKFGHLSFKALQNLIPIMEEGKSFVDATKELSYDTTGLKKTKKSRLLPPIPDDITNPIVKRSLTQSRKVVNSIIKTYGPPLSIHIELARELSKDHEERRKISKTQDENYRRNKGAIEVLLENGIINPKGYDIVRYKLWKEQRECCAYSLKKIPADVFFSELRRERGSSPILEVDHILPYSQSFMDSYHNKVLVYSDENRKKGDLIPYDYIKGEEQRWKDFESYVQTNNLFSKKKREYLLKKEYTSRESDMVKERHLNDTRYATRFFKNFMEQRLLFKEAKVSMKKRVQTVNGIITSHFRSRWGLEKVREDTYLHHALDAVVVACTDHHMVTRVTEYYKHKESSLKSRKPFFPWPWKGFRDELLTRLTSQPVPDKISEALQLGTSLPDYRIVSRMPKRSITGAAHKETIMMKGGIDEKTGKTIIVKRVALKDIKFDKNGDFEMVGKEQDMATYTAIKERYLQHKKNAEKAFEKPIYKPSKKGRGNPIKRVKVVFESKAFVREVNGGVANNEKLVRVDLFEKDGKYSMVPIYVMDTVTEKLPDKIVTIGKGHHQWRRLDESYTFLFSLHPYDLVRVRSEEADTFFYFGSIDINSNRIHFKHVNHPTKPNELRYALGKIDLLEKYEIGLLGDIKQVKKETRNTFHQPKKQLTME

SEQ ID NO: 111 - protein, 1081 aa, Bacillus megaterium
  source 1..1081: note = Bacillus_C megaterium
  REGION 1..1081: note = LPG10138
MKNLDYRIGLDIGTNSVGWSVIELNFNQTTNRYEKVGIIDFNVRMFNKAEIPKTGASLAEPRRQFRSTRRQLKRKSIRKQKIRKLLIAQDVISQQELDNLYPLSKGSVDIWDIRVEGLDRYLNKIEWSRLLLHLAQRRGFKSNRKSDNQETEQGKVLPIIQENKQLLCSYRTVGEMWMKDEKFATSDKRKNTNDNYLFNVSREDLKQEIQLLFQQQRQFGSLYASEQTEKEYLDIWEHQLPFASGHDILKKVGYCSLEPKERRIPKATYTFQYFTVIDKLNNLRLGSHFEPLTKDQRDILLQKIMERTDFINKKTIPSIRYSDIRKWLALDDSIQFKGLIYEPNEKTQKIEKKEFVNLKPYYEIKKVILLHSEKTGETYTNMDIDTIGYALTVYKTDKDIRAYFRNSHNLSQKVFDDALIDELLNLSYTKFGHLSIKALRRLLPYLEEGLSYAEAVNKVGYDTTNLKGKKKERLLPKIPDDITNPIVKRSLTQARKVVNAIIRKYGSPLTVHIELARELSKNTNERKKLSKAQTKNYERNQDAIAILVENGILNPTGYDIVRYKLWKEQDERCMYSLRKIPAEQFFAELRRERGSTPLLDVDHILPYSQSFLDGYDNKVLVFSDENRKKGSRIPFYYLQENPKKWLDFEAYVQSNEKLSKKKRGYLVKKVYTARESDDVKERHLNDTRYATRFLKNFIEQFLVFKEAQIPMKKRVQTLNGRITSHFRSRWGFEKLREDTYLHHAVDAVVVACTDQHMVNKVTDYYKSKEQSLKSNAPYFPWPWERFRDEMLTRLHAQPVPDQIKQAITGYSPLSDYRLVSRMSKHSVTGAAHKETIMMNGGENNKTGKTIIVKRMLLKEIKFDNNGDFKMVGKEQDPATYQAIKQRYLSYDKDAEKAFEKPLYKPSKKGHSNLIKRVKVEIQEKTFVREVNGGVAENGDLVRIDLFKKEDTYYMIPIYVLDTSSPELPDHIVTSGKGYKLWKKLDESYTFQFSLTPYDLIRVKINEKDQFLYFSTIDISNNRIICKHVNKPSVPKECTYSLTKIEIIEKCKVGILSDVSFVKNEKRRSFGHPAKKVALQTR

SEQ ID NO: 112 - protein, 1081 aa, Bacillus megaterium
  source 1..1081: note = Bacillus_C megaterium
  REGION 1..1081: note = LPG10139
MRNLDYRIGLDIGTNSVGWSVIELNFNQTTNRYEKVGIIDFNVRMFNKAEIPKTGASLAEPRRQFRSTRRQLKRKSIRKQKIRQLLVTHDVISQQELDNLYPLSKGSIDIWDIRVEGLDRYLNKIEWSRLLLHLAQRRGFKSNRKSDNQETEQGKILPIIQENKQLLCSYRTVGEMWMKDEKFATSDKRKNTNDNYLFNVSREDLKREIQLLFQQQRQFGSLYASEQTEKEYLDIWEHQLPFASGHDVLKKVGYCSLEPKERRVPKATYTFQYFTVIDKLNNLRLGSHFEPLTKEQRDILLQKIMERTDFINKKTTPSIRYSDIRKWLTLDDSIQFKGLIYEPDEKTQKIEKKEFVNLKSYYEIKKVILLHSEKTGETYTNMDLDTIGYALTVYKTDKDIRAYLRNPHNLSQKVFDDVLIDELLNLSYTKFGHLSIKALHRLLPYLEEGLSYAEAVNKVGYDTTNLKGKKKERLLPKIPDDITNPVVKRSLTQARKVVNAIIRKYGSPLSVHIELARELSKNASERKKLSKAQTKNYERNQGAIAILVENGILNPTGYDIVRYKLWKEQDERCMYSLRKIPSEQFFAELRRERGSTPLLDVDHILPYSQSFLDGYDNKVLVFSDENRKKGDRIPFDYLQENPKKWLDFEAYVQSNEKLSKKKRGYLVKKVYTARESDDVKERHLNDTRYATRFLKNFIEQFLFFKEAQIPMKKRVQTLNGRITSHFRSRWGFKKIREDTYLHHAVDAVVVACTDQHMVNKVTDYYKSKEQSLKSNAPYFPWPWEGFRDEVLTRLHAQPVPDQIKQAITSYSPLPNYRLVSRMSKHSVTGAAHKETIMMNGGENNKTGKTIIVKRMLLREIKFDDNGDFKMVGKEQDPATYQAIKQRYLSYDKDAKKAFDKPLYKPSKKGHSNPIKRVKVEVQEKTFVREVNGGVAENGDLVRIDLFKKEDTYYMIPIYVLDTSSPELPDHIVTSGKGYKLWKKLDESYTFQFSLTPYDLIRVKINEKDQFLYFSTIDISNNRIICKHVNKPSVPKECTYSLTKIEVIEKCKVGILSDVSFVKNETRRSFGQPTKKVALQTR

SEQ ID NO: 113 - protein, 1103 aa, Bosea thiooxidans
  REGION 1..1103: note = LPG10141
MDWRFGGDLGTNSIGWAAAELVLVDGVWTPKRVVAAGSRIFSDGREPKSGASLAGARRDARAMRRRRDRFKQRQAALLKYLTLAGFFPSDAEERRKLAEVDPYELRARALDEALPHPHLGRALFHLNQRRGFKSNRKADRGRNDDDSGKIRIGVRELHAQMDAAGARTLGEFLHGRRAGADQNAIPLVRTRIVAHLAEDGKASEAYNFYPDRRMLEDEFEAVWEAQIPHHPDALTPERKAQFHEIIFHQRPLKEPKIGYCTLRPPEPRLPKAHPLFQRRRLLEEVNALKIVLPGAEARALEKPERDSLLSKLAAKKTVAYASLRKALKLDPDARFNKESDNRKDMKGDEVAAEMSHAKRFGKAWLGMSPETQWQVVDRLRQLESDEQVADFEAWLRERHGLSHEQAQAVTGARLPEGYGRFGETATRALIEALKEKVIVYSEAVTEAGLGHHSDFRDGQVWQDEKGNPALPYYGEILERHILPGTADPADDDVVSRIGRLTNPTVHIGLNQLRRVLNTLIRRYGPPLEIAIELARELKLDEERKREINTRNRENREAAEKRSKKLNELGQADKGGNRALLKLWEELNRDNVLDRRCVYSGRKISMEMLFSGAVEVDHILPFSATLDDSGGNRILCLREVNRIKRKRTPWEAQADLRAHFGPDAEWEAIAARAARLPKEKRWRFEPDAIHRFDAQGGFLARHLTDTQHLSRLAREYLSALYPERGEGSSHVWVSPGRLTEMLRRAWSLNHHLPDHNLAGHASQPKNRKDHRHHAIDAIVVAVTDRSLLNRIAREAGRHGHEEASRVVADIPEPWDGFSDEVGRVLRSIVVSHRPDHGTASKAGLARQKDATAARLHNETAYGLTGEKDARGLDIVVTRKPLSSFRKPADLDAIRDEDLKRKLKDWTAGKEGGAFEQAMRAFGHLERGPRSYPGLRRIRVVEPLSVIPIKDREGRAYKAYKGDSNHRFDMWELTNGKWKDEVVSMFEAHQRDWVSPIRAANPTARKVLSLQQNDVIAIEQEDGRKLMRVVKFSAGTLVLALPQEAGSLKTRDADKDDPFRYVYGSPSSLLRWKARQVRIDEIGRVLDPGFPARKPRAGKTRGEEA

SEQ ID NO: 114 - protein, 1158 aa, Bifidobacterium thermacidophilum
  REGION 1..1158: note = LPG10146
MTPLAKKGISMSDKTYRIGIDVGLYSVGLSAIQVNDDDDPVRILNAQSVIHDGGVDPNAQKSADSRRAQSGIARRTRRMRRNRKKRLKRLDQLLVESGFPVSGENDLEGFEPWLLRAQAADALIEDEDVRKRAISVSCRHIARHRGWRNPYLDVRTLLTVDSPSSAFYDKLVENAALEMDGQMPDSDAAPAQIVRDVLEYKRGGAAIRLRKSTAENKKDRFALFPEKMMQDDYAYELRLILAKQAVPKDIARKLILAVFQSQSPKGSAEKRVGKDPLDPSQPRALKASLAFQEYRILNILTNLRLRDGGMERRLSIEEKQKLYKMLVEDTGREKKYETWTDIASAMEWKRNWLKGVGSLTADGDDRVTSRPPHIDIVEKLNGIKDTKFRKSILSWWKSASTANREAMIALLSNTVDIAKKQDDPDFSSAVDFIDSMDDNDLQILDTISIQPGRAAYSSRTLRALSEQMYSTDDDLHEARKHVFGVDDSWCPPQPAIGAPLGNPSVDRVAKIVNRWLLACQSRWGNPLSIQIEHVRDALSSAATATADKRAYERALGKRNAEKMEIKNQLRQQGLDEPHESDIRRQEAITRQQGKCLYCGDDIKFSTCEMDHIVPRKGPGSTNTRDNFAAVCITCNRQKSNMPFAVWCQTPEAKSRGVSLEDAIQRVRGFFTESKELKGRQAKAFISSMIMRLKQTTADDPIDSRSIESVAWMADELHRRIDWHFNGSTSESDHDRKVQVVVYQGRITSEARNVMRFQADGDFHFVGGHGKTRLDRRHHAVDASVIAMMTPAAAHTLAERINIRDSQRFIGRLEEDEVDWKQWPSKPTEKYQQWLNRGKRLFVLINEALDNDRIPITHWQRYALGNSIAHDATIHPLQKIPLGSAIDNESIRRAATPALYCALTRCPEYSVNDGLPENKQRHITVNGKVYGPEDEVEFFASTAAQIAIQGGSADIGSAIHHARIYRCYTVNGKGVKRWFYGMIRVFQTDLIHARHDNLFAYPLPPQSISMRYAEPRTAQAVLDGRAEYLGNLVVGDEIDIPSGGKFTGQIKTYLDFIEQLPGNYKLVEKWSVDGFMTNSKLRMHPLCLAGEGLKKMEDILEKEAPADVQKVLIHPGWLPSVDIVFSKNPQVIRRNTLGEPRWKSRSGMPISWQVTGSEA

SEQ ID NO: 115 - protein, 1268 aa, unidentified
  REGION 1..1268: note = LPG10147
MKQILGLDLGTNSIGWALVEIDENCTPLRIIAMGSRIIPLSTDDRTQFERGQSISKNQDRTIARTQRKGYDRKQLKKSDDFKYSLKKELKKYNIFPDVNLLNLPMLDLWKLRSDASSEPIDAKQLGRILYMLNQKRGYKSARSEANADKKDTDYVAEVKGRYSLLKESNLTIGQHFYKELSFANSNSSYYRIREQVYPREAYIEEFDVIMNEQKKHHSFLTNDVIERLRDNIIYYQRKLKSQKGLVSICDFEGFEKEIFDTKKQKNKISFVGPKVAPKTSPISQLCKIWEVVNTITLKVKNPEGSKYKWSDRFPTIEEKKIISEHLSKNALLSFNDLLKILNLKKDEVYANKQILKGIQGNITFNEIHKITGDTEWLDFNLISIESNEDALLVDKKTGEILEEKKRLLIDASFEKEPFYQLWHTIYSIKDLDECKSALVKRFDFTEEIANKLSKIDFNKQAFGNKSVKAMRKILPYLMQGFDYSQACSLAGYNHSNSLTTEEKNQKELKDKLDLLPKNSLRQPVVEKIINQMINVVNAIIGRYGKPNEIRVELARELKQSKDERDAADKSNSNNKKQNEMIAKRLESMGISASKKYIQKYKFIFPAKDKKWKEADVVNQCIYCGEHFNLSEALTGDNFDVDHIVPKALLFDDSQMNKVLVHRHCNSSKLDKTAYDYLAAKGEQTLNSYLKRVDDWYARGILSYGKMERLKVSFVEYQERKKLKKETEADKKLWESFIDRQLRETQYIAKKSRQILEQICQNVTVTEGNVTAKLRKLWGWDDVLMNLQMDKYRELGQTEWKEWTSEHGKRKHKKEEISNWTKRDDHRHHAIDALVIACTKQGFIQRINTLNASDVKDEMQKDIEKSKIIFNEKLNTLDKYLVSQKPFTTAEVEKEADKVLISFKAGKKVATISKFKAKGKNIDTGVIVPRGALHEQFVYGKNKRIMKTEQNLKYLFENTNDIVSSKIKTLVESRINQFSGDIKLALSSLRKSPIYLDNNTKVLEKAKCYEIATVLKYPLSTITSKQVDDIVDKQVRELVRERLFVFGNKEKEAFKDILWFNEAKQIPIKTVRIYARPDANSIRVVKRDENGKEIGFAVLGNNHHIAIYKDKEEKLVQHSCTFWHAVERKKNKLPVVISNTSELWDSLDSSALDQSFLEDLPEDGLKLSFSMQQNEMFILGMSQEEFNDALKTNDKAILSKHLYLVWSISESNYWFRHHLETKNSELKKTEGVKESKRLYNIRSLGALFTLNPIKVRTNHLGEIIQVGEY

SEQ ID NO: 116 - protein, 1395 aa, unidentified
  REGION 1..1395: note = LPG10150
MAKNILGLDLGVSSIGWAVVQEDSKNPENNKIIKLGVRVNPLTVDEQLNFEKGKPITTNAGRTLARSARRNLQRFKLRRVNLIDVLKKNNILKETDLLTEVGKNSTFQTQKIRAISARQKIELSEFVRVLLLINKKRGYKSSRKAKNEEDGQIIDGMSVAKKLYEENRTPGEYSYQLLQEGKKQLPDFYRSDLQAEFDKIWNFQKQFNPEIFTNELYERLQGKNRNATWKELEIPFSLVGIKQIGTMQEKKMERYLWRSDAVKRQLDFETLAVVFQEINSNLNNSSGYLGAISDRSKELYFNNQTVGEYLYNQLKINPHTKLKNQVFYRQDYLDEFEKIWETQAKYHKELTKELKEEIRDIVIFYQRKLKSQKGLISICEFENREIEITENGKTKKKTIGLKVAPKSSPLFQEFKIWQVLNNLQFQNLETKEIFPIDLDFKQSIFDEVNIKGKLSAKDVLDIVGYSGKEWKTNFKDIEGNYTNENFYTAFLKIIASEGIEFPKEFKLTIDDEIKVSKINASAEIIKLFVKEKLSELGINTSVSDFNPELDGSDFEKQASYQLWHLLYSYEGDDSPSGNEKLYELLEKKFGFKKEHSKILAEIGFPQDYGSLSSKAMRKIYPYIKEHKYSDACNYAGYNHSKNSLTKEQLENRVLKEQLDILPKNSLRNPVVEKILNQMINLVNEVSKEYGRPDEIRIELARELKNNAEERANMTSEISKATLLHQKYAEILKKEFGIPVPSRNDIIRYKLYLELANNGFKDLYTDIQIKKEELFTDKYDIDHIIPQSRFFDDSFSNKVLVPRGANLKKGNFTAFDYLEIEEKEKLEKFLNVIKELYDKGAITKAKYEKLQKKGIEIGDGFIERDLRNTQYIAKKAKEILFGITNSVISTSGRITDKLREDWNLINTMKELNLEKYRKLGLTETVINSKGEEKQRIIDWTKRNDHRHHAMDALTVAFTTHNHIQYLNYLNARKDEKHKEHQNIFAIENLITKVFEKKNGSKERRFKEPIKNFRIDAKKHLDEVLISHKAKNKVVTKNINKIKKKGSVIAKTELTPRGQLHKETIYGSSKFLKTKEEKVSGKFDLETINKVQNEKFRNALLLRLQEFDGDSKKAFTGKNVISKNPIFLNKEKTEQLPETVTLAWYETAYTIRKVVNPDNFKDYKNIEKVIDKGVREVLMNRLKECNGNSKEAFSDLDKNPIWLNKSKGIAVKTVTINGINNAEALHYKKDHFGKEILDENGNKIAVDFVSTGNNHHVAIYEDDRGNLQEKVVSFYEAVERVNQGLTIIDKDYNADLGWKFLFTMKQNEMFLFPSEDFNPKEIDFFDEKNLGLISKNLFRVQKIATKDYFFRHHLETTVEDNSALKGITWRREGLNGIREILKVRLNHLGKIVYIGEY

SEQ ID NO: 117 - protein, 1439 aa, Chryseobacterium sp.
  source 1..1439: note = Chryseobacterium geocarposphaerae
  REGION 1..1439: note = LPG10155
MAKNILGLDLGTNSIGWALINQDFDKKEGKILGMGSRIIPMSQDILGEFGKGNSVSQTATRTDYRGVRRLRERFLLRRERLHRVLNILSFLPEHYASQIDFEKRFGKFKEDTEPKLAYNKNGFIFKNSFEEMLSDFKKHQPQLLENDKKIPYDWTIYFLRNKALTQKIEKEELAWILLNFNQKRGYYQLRGEEEEENPNKLVEFYFLKIVDVLADEPQKGKSDIWYSLILENGWIYRRSSKIPLFNWKDKTRDFIVTTDLNDDGSIKTDKDGNEKRSFRAPSENDWTLVKKKTEQEIDQSHKTVGTYIYETLLQNPKQKIKGKLVRTIERKFYKDELKQILEKQKEFHPELQNDDLYSDCIRELYRNNEAHQLTLSKKDLVHLLMEDIIFYQRPLRSQKSSISNCTLEFRKYKDENGGEHTQYLKAIPKSNPYYQEFRIWQWMYNLNIYKKDDDTNVTKEFLSLTKDFENLFEFLNSRKEVDQKALLKHFKLNNKTHRWNFVEDKKYPCNETRIMISSRLDKVENISEDFLTREIEQKIWHIIYSVNDKVEYEKALKSFANKNNLDEISFFEAFKKFPPFKSEYGSFSEKAIKKLLPLMRLGKYWNYADIDKNSKDRIQKIINGEYDENIKDKVREKAVHLTAENDFQGLQLWSAQYIVYERHSEASMIGKWNSADDLEEFLKDFKQHSLRNSIVEQVITETLRVVKDIWLKYGNGAKDFFNEIHIELGREMKLPADDRKKLTNQISENENTNLRIKALLAEMMNDHSVENVRPFSPMQQEILKIYEDGVLNSGIEIEDEYLKISKTAQPSSSDLKRYKLWLEQKYKSPYTGQIIPLNKLFTPEYEIEHIIPQSRYFDDSFSNKIICESAVNKLKDNYIGLGFIKQFGGTIVELGFGKSVKVFEAEEYEDFVKKNYANNRSKRNKLLLEDIPEKMIERQLNDTRHISKYISGLLSNIVRVEDGTDEGINSKNIVHGNGKITTQLKQDWGLNDVWNELILPRFERMNQLTNSTDFTAWNENHQKYLPTVPIEYSKGFSKKRIDHRHHALDALVIACATKDHVNLLNNQSAKSETKRYDLKKKLMKFEKVSYIHTQTGEKIEKEVPKQFLKPWENFTVEAKNSLEKIIVSFKQNLRVINKATNYYEKYVEKDGLKIKERVEQTATNWAIRKPMHKDTVSGKIDLPWVKVPKGKILTATRKALDTSFDLKSINSITDTGIQKILKNYLDFKGSPELAFSPEGIEDLNKNIEKYNDGKPHQPINKVRVFELGSKFQVGQTGNKKAKYVEAAKGTNLFFVVYEDKNGERSYETIPLNEIIERQKQGLSVVDLRGTNDFYLCPNDLVYIPSGDKIENKNNIDFGNLAKENIEKIYKVVSFSGGQIFFIRQDIATSIVNKAEFSTLNKMERAMDGSMVKELCIKLNVDRLGNFKSIVYDHPLHLHR

SEQ ID NO: 118 - protein, 1461 aa, unidentified
  REGION 1..1461: note = LPG10159
MTKTILGLDLGTNSIGWALIKQDFENKQGIILGLGSRIIPMSQDILGEFGKGNALSQTAERTGYRSTRRIRERFLLRRERLHRVLNILGFLPAHYSAKIDFEKAIGKFVNHSEPQICYDNGFIFSASYEEMLHDFKQNYPDYFVDENGKPRLVPHAWTLYYLRKKATRHKISKQELAWILLNFNQKRGYYQLRGEEEEENQHRLVEFHSLRVVNVIADAQKNNKGESWYSLTLENGWTYRRSSKIPLDDWNGKVKDFIVTTDLNDDGSEKRDRDGEIKRTFRAPGPDDWSLLKKKTEFEIEQSQETVGAYIYDSLLRDPKQKIKGKLVRTIERKFYKSELKRILTKQAEFHPEFSDQDLLTDCARELYRNNEQHRQQLESKDLIHLLMNDIIFYQRPLRSQKSGIGRCSLEYKSYKAKDQHGHPLQDADGNVIEKRAYAPAIAKSNPYYQEFRLLQWMSNLAFYQKDSDESITAHLIPDIETYERLFDFLKERKEIKQDTLIKFLLGQKGLKGKDLTNESAKLRWNYVEDKLYPCYETRALITSRLDKISNLPQHFLTTEKELALWHILYSVNDKVEFEKALKTFAEKNRLNEDEFVAAFRKFPPIQSDYGSLSERAIKKLLPLMRFGSYWSWDLIDEYTKNRIDKVLTGEYDEKIKARVREKAQHLSTEHDFQKLPLWLAQYIVYDRHAEAADLGKWTSIADLAQFISDFKQHSLRNPIVEQIVTETLRVVKDIWMSYGAGAPDFFDEIHIELGREMKNPADERKRLTNAMTENENTNLRIKSLLAELAYDQEIVNVRPYSPMQQELLKIYEEGVLNSGIAIDDDILKISKTAQPSSADLKRYKLWLEQKYRSPYTGLPIPLNQLFTPAYEIEHIIPQSLYFDDSMSNKVICESAVNKLKDNKIGLSFIQAHQGQMVDCGFGKLVRISEVRDYEQFVENCYAKNRSKRNKLLLTDIPEKMIERQLNDTRYISKYITGLLSNIVRDNRENGKDDGVNSKYVLPGNGKVTSRLKQDWGLNDVWNNLILPRFERMNKLTNSTSFTSWNENHQKYLPTVPVELSKGFSKKRIDHRHHAMDALVIACATRDHINLLNNESAKNSVKRHDLNRKLRSYEKVTYADARSGAIIAREVPKGFLKPWNNFTADARTALNDIVVSFKQNNRVINKATNYYESYTDEDGNLRLDKNNKPLKGLVAQKGTNWAIRKSLHKETVSGKVNLPGIKLAKGKILTATRKPLDASFNLKSILSITDTGIQKILQNYLKAKDNKSEIAFSPEGIDELNQNIAFYNDGKQHQPIKKVRIFEQGSKFSLGETGTKSTKYVEAAKGTNLFFAIYADADGKRNYATIPLNIVIERQKQGLPSVPETNEKGNRLLFSLSPNDLVMITPVDSDNWPVSDRIYKVMSFTGNQAFFIKHAVSTSIVNKGEFSTLNKSERSIEGLMIKEGCEKINLDRLGKIVKIEP

SEQ ID NO: 119 - protein, 1462 aa, Chryseobacterium ureilyticum
  REGION 1..1462: note = LPG10160
MFSQRNNPYCELLFKIISTNIEEKIFTIIMGIHNSDVFFISIFIWYHKIITMNKHILGLDLGTNSIGWALIKQNSESRQGSVLGMGTRVLPMSQDILGDFGKGNSVSQTAARTGYRGVRRLRERFLLRRERLHRVLNILGFLPEYYASQIDFDKRFGKFREETEPKLPYNNEGFIFKNSFEEMLLDFKISQSELLSGNKKVPYDWTIYYLRKKAVYQKIEKEELAWILLNFNQKRGYYQLRGEDFDEEKDKTFVTLDVEKVIDSGEKIKENVLFDVYFTNGWKYEKQITKPQDWIGRTKEFIITESTLKNGDIKRTFKAVDSEKDWIAIKAKTEQEIDSSHKTVGSYIYDAILQNPKQKIRGKLVRTIERKFYKEELKQILEKQKEFYPELQNNDLYNDCVRELYRNNEAHQLNLAKKDFVHLFLEDIIFYQRPLRSQKSSVSNCTLEFRKYKDGNGVDRIQFLKVIPKSNPYYQEFRIWQWMFNLSIYRRDDDINITSDHLKTIEDYERLFEFLNNRKEVDQKALLKHFKLNDKTHQWRYVEDKRYPCNETRAMIIACLGKTETNTVEFLTRKIEQEIWHIIYSVNDKTEYEKALKSFAKKNHLDENSFFEVFRKFPPFISEYGSYSEKAIKRLLPLMRTGKYWSWEDIDAKSKNRIQKIITGEYDEDIKDNIREKTRTLQKESDFQGLPLWLAQYVVYGRHSEASLTGKWNSVDDIEEYLREFKQHSLRNPIVEQVITETLRVVKDIWMKYGNGVKDFFSEIHIELAREMKLPAKERNKMTQRISENENTNLRIKALLAEMVNDSEVRNVRPYSPMQQEILKIYEDGVLNSEISMDDDILKISKTAQPSSSDLKKYKLWLEQKYRSPYTGEIIPLNKLFTPEYEIEHIIPQSRYFDDSFTNKVICESAVNKLKDNYIGLGFIKQFHGYKISDRIKVFEVEEYEDFVKKNYSNNRTKRSKLLLEEIPEDMIERQLNDTRYISKFISGILSNIVRKEVNDDGVNSKDIIPSNGKITSELKQDWGLNDVWNELILPRFERMNLLTKSNDYTVWNEKYQKFLPTVPIEFSKGFSKKRIDHRHHALDALVIACATRDHINLLNNQSAKSEMKRYDLKRKLMKFEKKIYQHPQTGEKIERDIPKQFLKPWEKFTVEAKDNLDKIIVSFKQNLRVINKATNHYEKWIEKDSIKVKGLVEQEGLNWAIRKPLHKDTVAGKVELPWIKVPRGKILTATRKSLDTSFDLKNISSITDTGIQKILKNYLEYKGSSEEAFSPEGIEDMNRNIEKFNDGKPHQPIIKVRFFELGSKFPLGQIGNKKHKYVETAKGTNLFFAVYEGDKDKRTYETISLNEVIERQKQGLSPVALKSKNDFYLCPNDLVYVAAEDELVDSFDFQTISKENINNVYKVVSFSGSQIFFVRQNVAVSIVNKTEFSTLNKMEKAVDGRMIKESCVKLKIDRLGNITNS

SEQ ID NO: 120 - protein, 1077 aa, Bacillus sp.
  source 1..1077: note = Bacillus cytotoxicus
  REGION 1..1077: note = LPG10165
MKYSIGLDIGIASVGWAVINEDIERIEDMGIRIFDAAENPKDGSSLSTPRREARSTRKRLRRRRHRVERIRQFIIQKGLLTQVQMEQLYDWKAEDLDIWLIRVNGLERKLTDREFARVLIHLVKNRGFKSNRKSELKEGDNGVVLSAVQENKQLMEEKGYQTIAEMLLFDERFEGCKRNKGGAYSHVVARSDLEHEIRLIFQKQREYGHAFSTTENEEAYINIWSSQRPFATKDDIAKKIGYCTLEPKEKRTPKSTYTFERFRAIDKLNRLRILSAITPSRELTQEERDDVLNSLFSKKEVKYKELRKLLRLKDEQRFNEIYYAPNESNEKNENRTFLSLESQHKIRAIIKQVEGKNVNDSYRPIDLDTFAYALTVFKDDQDIRDYLQNRYVSSNGKKVLNLANLEYKEKLIEELLQLSFTKFGHLSLKALKNILPYMEQGMPYHQACAEAGYTFNQRVNKEKQYLLPVIPTKDIANPVVIRSMSQVRKVVNGIIKKYGSPSAIYIELAREMGRVYKERKELEKQYNKNREINEGAKKHIVELHPQLGDPRGHDILKYKLWKEQDGRCAYSFQPISIERLFHIGYAEVDHIIPYSRSFDDSNSNKVLVIAAENQNKQNRTPYEWFGHNEIKWQKFTSFVTTMKVSKKKKGLLLKKDFDEDQAEEFRSRHLNDTRYITRFIKTFIEDNLLFRTEENRKQYAHTVNGAYTSLMRKRWGFNKNRQENDLHHALDAVIIAVSLPFKHRVSAYFKRREEYAHNQLKREGEFFPEPWPEFIHELEIRMMQEPEKMKLAMESLDLKTYDESFINELNPVFVSRMPKRSIKGQIHEETLKRVRGYTEDGYIRTVKKVRLDQIPFDKNGDFSMFGKETDMKTYEAIKNRYLEFGKDKKKAFNSPLYKPAKNPENAPIIRSVKIEDKANRVVMLDEKTAADNASIVRTEVFRHKGTGNYFLTPVYVADVLSKRIPDRVITTKKPYSEWKRITDDFEFLFSLYPNDLIRVKMPKEKETKTNMKEKYVWQENFMYFKGVHSGSAGVRMIDHMNSFEDEIGVQKLIIFEKYQVDPLGRITKVHGEKRHGI

SEQ ID NO: 121 - protein, 1145 aa, Nitrobacter winogradskyi
  REGION 1..1145: note = LPG10166
MGIKNSKPYRLGLDLGSNSLGWFVTYLEKRGDHDEPVALGPGGVRIFPDGRDPQSGMSNAVDRRMARGARKRRDRFVERRKELIAALVKCGLLPNDSRERRTLERLDPYALRRAALIDALPAHHIGRALFHLNQRRGFQSNRKTDSKQSEDGAIKQAATKLMAVMAEESAATLGSFLADRHLSDAYLDRQNAVRAELVRLGKDHLTGNARKKAWAKTRKRLFGDEVLPPKDGPDGVRARVTMIGTKASYDFYPTRAMVLDEFNAIWAAQREHQPAMTDEAKKEIEHIIFFQRPLKPAIVGKCTLDPATRPFKEDPEGYRAPWSHPLAQRFRIFSEARNLEIREIGKGSRKLTKEQSDLVVAALLAHKEVKFDKLRTLLKLPPEAKFNLESDRRAALDGDATAARLSDKKGFGKVWRGFPLERQIAIVTKLEETENEDELIAWLEKECALDGAAAARVANTTLPDGHCRLGLRAIGKIVPIMQNELDDDGVSGAGYHIAAKRAGYDHAKLPTGEQLNRLPYYGQWLADAVVGTGDARDGKEKQYGQFPNPTVHIGLGQLRRLVNELIDNYGPPTEIAIEFTRALKLSEQQKADWQREQRRNQDKNTARAAELGKFGFPANPRNLLKMRLWEELAADPLDRKCIYTGEQISIERLLSEEVDIDHILPIAMTLDDSAANKIICMRYANRHKRKMTPVEAFGSSPTLQGHRYDWDAIAARAANLPRNKRWRFDANAREEFEKRGGFLARQLNETGWLARLAKQYLGAIADPNRIWVVPGRLTAMLRGKWGLNALLPDHNYAGVQDKAEEFRASTDDMEFSGIKNRADHRHHAIDGLVVALTDRSLLWKMANAYDEEREKFVIEPPWATMRDDLKSALDKMVVSHKADHGIEGKLHEDTAYGVLKEPEKIDDQDKDGANLVYRKAVEALNDNEIDRIRDRRLRTIVRDHVDAEKKKGVGLADALRQLTELRDHPQIKHGLRHVRILKKEKSEYLVPIANRKTGQFYKAYSAGENFCVEVFETADGKWDGEAVRRFDANQQNAGAKTPHALQWRIAHPDAKLVMRIHKGDLIALDYNGTRTIMVVRQLEASNNRFKLAPHNETGNLQTRHNTANDVDPFRWLIASYNALKKANAVPVRVDELGRVWRIAPG

SEQ ID NO: 122 - protein, 1071 aa, Bacillus sp.
  source 1..1071: note = Bacillus toyonensis
  REGION 1..1071: note = LPG10167
MSELDYRIGLDIGTNSIGWGVIELFWKKDRERYEKVKIVDKGVRMFDKAEIPKTGASLAEPRRIARSSRRRLNRKSQRKKDIRNLLVQHGVITQKELDSLYPLSKKAMDIWDIRLDGLDRLLNHFEWTRLLIHLAQRRGFKSNRKSELKDAETGKVLSSIQVNEKRLSLYRTVGEMWIKDADFIKYDRRRNSPNEYVFSVSRANLEKEIVTLFETQRKFQSPYASKNLQEAYLQIWAHQLPFASGNAILNKVGYCSLLKGKERRIPKATYTFQYFSALDQVNRTRLGPDFQPFTQEQREIILDKMFQRTDYYKKKTVPEVTYYDIRKWLELDETIQFKGLNYDPNEELKKIEKKPFINLKAFYEIKKVVANYAERTNEAFSTLDYDAIAYALTVYKTDKDIRSYLKSSHNLSKRCYDDQLIEELLSLSYTKFGHLSLKAINYVLPIMQEGRTYKEAADQLGYDTTGLKKEKRNKFLPLIPDEITNPIVKRALTQARKVVNAIIRRYGSPHSVHIELARELSKNHDERKKIVSAQDENYKNNKGAISVLSEYGILDPTGYDIVRYKLWKEQGERCAYSLKEIPPDTFFNELKKERNGSPILEVDHVLPYSQSFIDSYHNKVLVYSDENRKKGNRIPYTYFLETNKDWEYFETYVRSNKLFSKKKREYLLKKAYLPRESELIKERHLNDTRYASAFLKNFIEQNLQFKEVEDNLRKRRVQTVNGVITAHFRKRWGLEKDRQETYLHHAMDAIVVACTDHHMVTRVTEYYQIRESNKSVKKPYFPMPWEGFRDELLSHLASQPIAKKISEELKAGYQSFDYIFVSRMPKRSVTGAAHDQTIMRKGGIDKKGKTIIIKRLQLKDIKFDENGDFKMVGKEQDMATYEAIKRRYLEHGKKSEKAFETPLYKPSKSGRGNLIKRVKIEVQTKSFVREVNGGVAQNGNLVRVDLFEKDAKYYMVPIYVPDTVFSELPNKAVTSSKGYKQWLTLDNSFMFKFSLYPYDLVRLVKGNEDRFLYFGTLDIDSDRLIFKDVNKPSKQTEYRYSLKTIEDLEKYEVGVLGDLRLVRKETRRNFQ

SEQ ID NO: 123 - protein, 1072 aa, Bacillus sp.
  source 1..1072: note = Bacillus toyonensis
  REGION 1..1072: note = LPG10168
MSELDYRIGLDIGTNSIGWGAIELSWNKDRERYEKVRIVDKGVRMFDKAEIPKTGASLAEPRRIARSSRRRLNRKSQRKKDIRNLLVQHGVIIQKELDSLYPLSKKSMDIWDIRLDGLDRLLNHCEWARLLIHLAQRRGFKSNRKSELKDTETGKVLSSIQVNEKRLSLYRTVGEMWMKDPDFNKYDRKRNSPNEYVFSVSRADLEKEIVTLFEAQRKFQSSYASKDLQETYLQIWAHQLPFASGNAILNKVGYCSLLKGKERRIPKATYTFQYFSALDQVNRTRLGPDFQPFTKEQREIILDKMFQRTNYYEKKTIPEVTYYDIRKWLELDETIQFKGLNYDPNEELKKIEKKPFINLKAFYEIKKVVANYAERTNEEFSTLDYDAIAYALTVYKTDKDIRSYLKSSHNLSKRCYDDQLIEELLSLSYTKFGHLSLKATNYVLPIMQEGRTYKEAADQLGYDTTGLKKEKRNKFLPLIPDEITNPIVKRALTQARKVVNAIIRRYGSPHSVHIELARELSKNHDERKKIVSAQDENYKKNKGAISVLSEYGILDPTGYDIVRYKLWKEQGERCAYSLKEIPPDTFFNELKKERNGSPILEVDHVLPYSQSFIDSYHNKVLVYSDENRKKGNRIPYTYFLETNKDWEYFETYVRSNKLFSKKKREYLLKKAYLPRESELIKERHLNDTRYASAFLKNFIEQNLQFKEVEDNLRKRRVQTVNGVITAHFRKRWGLEKDRQETYLHHAMDAIVVACTDHHMVTRVTEHYQIRESNKSVKKPYFPMPWEGFRDELLSHLASQPIAKKISEELKAGYQSFDYIFVSRMPKRSVTGAAHDQTIMRKGGIDKKGKTIIIKRLQLKDIKFDENGDFKMVGKEQDMATYEAIKRRYLEHGKKSEKAFETPLYKPSKSGRGNLIKRVKIEVQTKSFVREVNGGVAQNGNLVRVDLFEKDAKYYMVPIYVPDTVFSELPNKAVTSSKGYKQWLTLDNSFTFKFSLYPYDLVRLVKGDEDRFLYFSTLDIDSDRLIFKDVNRPSKQTEYRYSLKTIEDLEKYEVGILGDLRLVRKETRRNFNR

SEQ ID NO: 124 - protein, 1053 aa, Staphylococcus sciuri
  source 1..1053: note = Staphylococcus_A sciuri
  REGION 1..1053: note = LPG10169
MKKNYILGLDIGITSVGYGVIDYETRDVIDAGVRLFKEANVENNEGRRSKRGTRRLKRRRRHRLQRVKKLLFDYNLLTDHSELTGINPYEARVKGLSQKLSEEEFSAALLHLAKRRGVHNVNEVEEDTGNELSTKEQISRNSKALEEKYVAELQLNRLKAEGEVRGSINRFKTSDYVKEAKQLLKVQESYHQLDQSFIDTYIDLLETRRTYYEGPGEDSPFGWKDIKEWYEMLMGHCTYFPEELRCVKYAYNADLYNALNDLNNLIIARDENEKLEYYEKFQIIENLFKQKKKPTLKQIAKEILVNEEDIKGYRVTSTGKPEFTNFKVYHDIKDITARKEILENAELLNQIAEILTIYQSSVDIQEELAKLNLELTQEEIEQISKLTGYTGTHSLSLKAINLILDELWHTNDNQMTIFNRLKLVPKKVDLSQQKEIPTTLVDDFILSPVVKRSFIQSIKVINAIIKKYGLPKDIIIELAREKNSKDAQKIINEMQKRNRQTNERIEEIIRTTGKENAKYLIEKIKLHDMQEGKCLYSLEAIPLEDLLNNPFNYEVDHIIPRSVSFDNSFNNKVLVKQEENSKKGNRTPFQYLSSSDSKISYGTFKKHILNLAKGKGRISKKKKEYLLEERDINRFSVQKDFINRNLVDTRYATRELMNLLRSYFRVNDLDVKVKSINGGFTSFLRRKWEFKKERNKGYKHHAEDALIIANADFIFKEWKKLDKAKKVMENQTVEDKQAESMPKIETEQEYKEIFITPHQIQHIKDFKDYKYSHRVDKKPNRELINDTLYSTRKDDKSNTLIINNLNGLYDKDNDKLKKLINKSPEKLLMYHYDPQTYQKLKLIMEQYGDEKNPLYKYYEETGNYLTKYSKKDNGPVIKKIKYYGNKLNAHLDITDDYPNSRNKVVKLSLKPYRFDVYLDNGVYKFVTVKNLDVIKKENYYEINSKCYEKAKKLKKISDQAEFIASFYNNDLIKVNGELYRTIGVNNDLLNRIELNMIDITYKEYLENMNDKRPPRIIKTIARKTQSIKKYSTDILGNLYEVKSKQHPQMIMKG

SEQ ID NO: 125 - protein, 1083 aa, unidentified
  source 1..1083: note = B. mosaicus
  REGION 1..1083: note = LPG10171
VKLQYVLGLDIGIASCGWAVINTEKERIEDLGVRIFDKAENPKDGKSLATPRRDARSTRRTLRRKKHRMQRIKILLVKHGLLSKTELDHLYESATENDVWDLRLNALERRLNPKEFARVLIHLAKRRGFKSNRKETTLSESGQILENISENQQIMEQQNYRTVGEMILKDKKFENHKRNKDGTYIGTVTRQQLQDEIHMIFNAQRLFKNNFATEEFESHYLEIWSSQRPYASKDQIEKMIGYCTLEPKEKRAPKASWSFQYFVALQTINNLRLISKDRIEELSFEEKKQIMNLALEKPIVKYIDIRKLLSISNDLHFNNLLYSTDTVDTTVENRKCIELKEYHSINKVYKQIYGKGVPNLLPIDYDTIAYALTIFKDDKDILEYLQNKYVNAKGKPINNSAKKTYDDIFIQALLTLNFTKMGHLSFKSLKNIIPFLEDGLSYDKACEKAGYNFKGTSYTEKTKYLPVIPQNTNPVVHRALSQTRKVINAIIKKYGSPKAIHIETARELSKTFQERKEIDSMYQDNSKKNEHAIRKLKELGNINPSGINIVKFKLWNEQDGRCMYSGKYIEPHRLFEEGYTEVDHVLPYSRSLDDSYNNKALTLGTENQGKGNKTPYEFMGNTSIWNEFETRVQSNKKINKRKQQKLLLQNFSHAREQEFIERNLNDTRYATIYLSSLIQQHLIFSESSREKKVHTVSGIITSHLRSRWGFNKDRKEGHIHHALDAVIVAVTSDHMIQRVTKYYKLKELNRNLQAKRIPFPEPWEGFRLELEARISPNTQQYLKGIRFKNYADINLTEIKPIFVSRMPKRSITGELHQETIRKFIGYNEKGKVLTTIKTKLEDIPFDANGDFPMYGKETDLYTYNAIKERYLSHKKDKRKSFQEPLYKPTKTGEIGPLIKSIKIIDTRTIVNPVNQGKGVVYNSKIARTDVFKKNDKYYLIPIYTIDLMKNILPQKAITAGKGYEDWTTIDHSFTFLFSLFPNDLIQIVPTKNRTIKAKTTVSKKEVLLPSLTGYFKGVHSGTAGITVETHDGSVIANIGSKQLLIFEKYQVDILGHYTKIKEEKRIGMATYNDNKKSTAFSSL

SEQ ID NO: 126 - protein, 1488 aa, unidentified
  REGION 1..1488: note = LPG10186
MAKQKYTVGLDIGTNSVGWAVINQDFKLVSGKKHINDNGKQKRSRTNLWGVRLFDAAETAEDRRLKRGMRRRIARRKERLNYLRGIFQADILAFDDSFFIRMDESFLQDDDKQATAFSYRDQSGAMQTRVVTEKEAVKYPLFNGKSGSGETYTDESAYYNQYPTIYHLRQRLIDNPAQADLRLVYLAMHHILKYRGHFVNQGQTFDLGNINIAGNLTSALDKLDEASSFKFGLADVDADQANAILKNKQWSASKKAYELNALFEIIQDTVYRRENETQAVTYDSLTVKQQEKWLAEKQKQVKAFLTGIVGNTISPKDIFANKDYDKKQNEDFPEKIKYSNENFEEQIGALEKYLDETEVAAIVAGKDVYESLVLSNILTKSTLSGSMIEKYNVHGAQLKSLKSFSRKVSAEFYDKLFNVVKDEKGKPHIGVYAQYVDGVGNPAKRLAREDFYDALKKVFESEFKGLTFPVGEKGIDFTKTDLSADRVAFIREMNEAINLENYLPKQRQADNGEIPYQVHEHELIRIIENQKQYYPFLGDKVQVAYEDESGQTQVRSEYKIQVLFKFRIPYYVGTLAKNSGWVNEDGKKLVARNVAAKNSWVVRNSDERVTPWNFEQVINKEASSINFIERMTNFDTYLPNEKVLPKNSLLYQEFIVNNELISSGYYLNGRKEYFLPEQRQRIITRLFKRYRKVSAKQMLDFLKNEYQIKLDDDPKKLFGLDTFVKVPSYNGSLSTVVDLTKKMGISEDLIANYPERFEEIIKWQTIFEDKKILKKTIREVNHNKWSGMLTAEQVNKLSKRHYTGWGRLSQKLLDGVKTSQGRTIIESLREGICDNFMRLIEDEKIAEFIANAQVAGAKDGVLAYDLVDQLPGSPAIKKGIWQSLRVLQELEHYLGRDAIGKVVIEMSRDDESSRRTKARKQQLEEFYKKFKESTGSDVTAELKRELSEKDAKEIDDEKVFLYFLQNGKSMYSGDQLYLSRLADYQVDHIVPQTYIKDDSLDNKVLVTQRDNQNKGGDTPSQTVVTRMNSYWEMLAKNGQVSPRKLANLKKGPITLKQREGFINRQLVENRQITKHVANILMNYYTGTDTLVLTPKSGLTSQLRSGLIYELNPAFDEAKALDRGKAYQVERYTTVKLHDRFVKNRKLNDYHHAHDAYLNAFVAQYVYQEHPEWKNAWVYGKYPRNGQADFGKWATQRKQKSLQLLSSMANDVWNLEDPDTMEKTILNRDETFEQMRQTLCYRNINIVKKLETQTGKFGDESVYKKGNKADHYSLGLKRKYPPQKYGGTKGAISAVTALVKDNSGRVIPVSISASDYDSYQNASDKLAWLLMRKKNIAEILVASLPKYTKYELPSGALRLLASYQEAQSAVELPMLNLGLMDDEAKVLNLYDQLAQFIADNKLFTDKKIALLKGEMRAAFDRLEEFKDKQKVIDELLGVTNGSNQGLQALNSIGLGTSNQRLKSGNTMTNGVTLINESVTGLYLTRTTYN

SEQ ID NO: 127 - protein, 1077 aa, unidentified
  REGION 1..1077: note = LPG10190
MKYSIGLDIGIASVGWAVINEDIERIEDFGVRIFDAAENPKDGASLSTPRREARSTRKRLRRRRHRVERIRQLIIQKGLLTQVQMEQLYDWKAEDLDIWLIRVNGLERKLTDREFARVLIHLAKNRGFKSNRKSELKEGDNGVVLSAVQENKQLMEEKGYQTIAEMLLFDERFDGCKRNKGGAYSHVVARSDLEHEIRLIFQKQREYGHAFATIENEEGFVSIWASQRPFATKDDIAKKIGYCTLEPKEKRTPKSTYTFERFRAIDKLNRLRILSSTIPSRPLVQEERDDVLNTLFSKKEVKYKELRKLLKLKDAERFNEIYYDPNESNEKNENRTFLSLESQHKIRTIIKQVEGKNINDSYRPIDLDTFAYALTVFKDDQDIRDYLQNRYVSSNGKKVLNLANLEYKEELIEELLQLSFAKFGHLSLKALKNILPYMEQGMPYHQACAEAGYEFNQRVNKEKQYLLPVIPTKDIANPVVIRSLSQVRKVVNGIIKKYGSPSAIYIELAREMGRVYKERKELEKQYNKNREINEGAKKHIVELHPQLGDPRGHDILKYKLWKEQDGRCAYSFQPISIERLFHIGYAEVDHIIPYSRSFDDSNSNKVLVIAAENQNKQNRTPYEWFGHNETKWQEFTSFVTTMKVSKKKKGLLLKKDLDEEQAEEFRSRHLNDTRYITRFIKTFIEDNLLFRTEESRKQYVHTVNGAYTSLMRKRWGFNKNRQENDLHHALDAVIIAVSLPFKHRVSAYFKRREEYAHNQLKREGEFFPEPWPGFIHELEIRMMQDSEKMKLAIESLDLKTYNESFINELKPIFVSRMPKRSIKGQIHEETLKRVRGLTETGYILTVKKTRLDQIPFDKNGDFPMFGKETDMKTYEAIKNRYLEFGKNKEKAFSTPLHKPAKNPNNAPIIRSVKIENKTNRVVMLDDKTAADNASIVRTEVFRHKETGNYFLTPVYVADALSKRVPDRLITPKKPYSEWKRITDDYEFLFSLYPNDLIRVKMPREKEAKTHAGEKCLWQENFVYFKGVDSADARIKVVDHMNSFEDRVGTQRLVTFEKYQVDPLGGINKVHGEKRYGF

SEQ ID NO: 128 - protein, 1061 aa, unidentified
  REGION 1..1061: note = LPG10191
MSKVLGLDIGISSVGWGIIDSQSGEIIDAGVRLFEEATRNANEDRRTFRGSRRLKRRRTHRLEQLKQLLTEVGLPLESIGVENPYEARRDAIYGEVTKERLVAAIYHLVKRRGVVLDAPEEESKVVNELSTKDQLAKNRKLLETKYICEIQLERINDSHEKMRNHENRFRTADYVIEAKAILAKQKEFHEELANEFIEKVINLIERRREYFDGPGSEKSPTPYGQYFLNKQGKLENVSMINKMRGKCTYFPDELRIPKMSYTADLFNLLSGDLNKLQIEGEYLTVEDKNYILENFIHKGKNITLPQLLKYKGVDSDAVVTGYRMDMKTDKPTFTDFKGYKNILKIVKEHDLPIDLLHNYDVLDEIVNILTAEKSYTRRAEQMNELLTMYSDTARRKIVTAFKESTDFVGYHALSKKAMMLILNELWATNKNQMELFSELKLEEKRVSGLTKTKNIQFDDDAILSTVAKRAHRETIKIVNEARKKYGEFETIVVETAREKNSDEKRKLYVDFQRNIGKLEKKMADLLSVKNLKDLRLNGKQHLALKLWDSQDGKCLYSGKAISLHEIVTNPTLFEIDHILPISLSFDDSQANKVLCYHAENQKKGQLTPFQYFMSGKTNRSFDQFKVEVLNLYKSRRITNKKKDYLLEQRDLQNNEELQKQFINRNLVDTQYAMRSFSMSLRTYFKANSIDTTVLSIRGSFTAALRRRARLNKDRDESYAHHAIDALIVAAIGKLPVFEFFKEFGMDEQGIIYNKETGEILGEDQFFEHKFMKLLRDLMNYESNIRYSHKVDRKGNRTMSNQTIYGTREKDGERYYLGKSDNIYQLDKNGVAPLLKRLAKSPDSFLIAEHNPELFSLIGKIVKEYPTADNPFKAYYNEHGYILKDGKVPVKILRYRDRKLGVHMNITDKYPGAKNDVVLLSIKGVRVDLYKNAEGNYKYLGVPYNWFKQVGNRLMLDLEKYEKEKKQSYKKIDDTYEFQMSLYKNDLFSFEKGGKYAERIFRGDSMPRQNKVEVDYVFKRKEEQKEGFLAPSTISNVIKYNVDVLGNRHKILKEIFNMYLQK

SEQ ID NO: 129 - protein, 1057 aa, unidentified
  REGION 1..1057: note = LPG10194
MSNRVPYRLALDLGTNSIGWCLLDLNGNGDPCGVRRMGVRIFPDGRDPKSKESLAADRRLARSMRRRRDRYLRRRSALMNALVAAGLMPADQAGRKALESEDPYELRARALTEPLTAGQVGRALFHLNQRRGFKSNRKAAGEENEAGKIKAGISALKAEIEASGETTLGAWLAARHRKRETVRARLDGAGAKASYEFYPERSLVHDEFQAIRTAQAPHHPDITAEQWDRIESVIFRQRPLRPVRPGKCTLFPDQERAPWALPVAQEFRILTEVGNLKLYRPGEEPRELSAGQHAQLFAKLCRSADLTFEKIRKELKLDPGLKVNLEGEKRDRLKGDAVTSALSAKKRFGPKWNALTPDDRRDIVGRLIEAEDEAELAGWLESVHGLASENAAHTAASPGLPDGYCRLSEKALVELVPLMRERLLRYDEAVRALDLHHSDFRPDGLLDELPYYGEPLERFIAFGSGEPSDPPELRLGRFPNPTVHIGLNELRKLVNRIVERWGKPADIVVELARDLKRSRDERDTIQREQAQNQRKNEDRFAKIKELGIDPRPDSMLRLRLWEELPKVGVGHVCVYTGEPIGIRRLLEGDVDIDHILPFSRTLSDGADNKIVCVRRANRFKRDRSPWEALGVTAVDGYSWAAIAERAEELPKNKRWRFLPDAMDRFEGERGFLDRQLVETRHLSRVARQYLASIVELNKVRVAPGKLTAMLRARWGLNKILSDGNLKNRSDHRHHAIDAAVLGVIDQRLVQLVAQAAARAEANELERLFDGLPDPFDGLAAMSFGDQVREKIRGITVSHRAEHGWQGRMHNDTAYGPVEAVNGVHTVVTRKPLSGLTAKEFPNIRDRVLAKALEDHVAAEAAAGRGFGDALGSFEWGGQPVRRVRMLDVLGNPIPIQDPSGTVFKVYKGDSNAWYEILRDPRGRWTGKIVSTFEAYRLHREWLAETGGDSGRGGGVFLDWAAKRVAGEAGTPLFRLFKGDLLALGEAPDRRIVRVVKFSEGQVALALHLEAGNLKARDADKGDPFKYQYCSPDSLRKQAARPAGVDLLGYVHDKGPLE

SEQ ID NO: 130 - protein, 1353 aa, unidentified
  REGION 1..1353: note = LPG10195
MRKNQEPYNIGLDIGTSSIGWSIMNDNFDLMRVKGKKGIGVRLYNEGQSAAERRMHRTARRRYGRRKWRLRLLEDFFDEHMAEVDDTFFARLKDSSISPKDDKKYRKSLLFPKSKGLTYQDDGEFYKKYPTMYHLRYALMTEHRKFDLREIYLAFHHMVKYRGNFLYDTSVDSFEAKNLDIKGKFDEINDLLSSYTDFYVDNSNAALVESILLEKNTTRKDKAKKIAKLLHVEDKEKVKNKKAKDLATQISNAVLGLKCNFHLIFELQQKYSFDLCSEKTEENIANLSEVLDENQKMLLMILKEIQDQVMLNAFVPSGMSLSEAMMQKYDAYGEQLKIYHELEHSVSDDSAAELRGAYCDYNDNIAKRDEFYNKLKKILSDMDKENVEQDVLESCGKLKKLIDENKLFIRQRTAANGVLPHQLHQIEMRKIIDNQKEYYPWLAEPNPNEKRRVYSKYKVEELIAFRIPYYVGPLVDPNNADKNKEARFSWMVRKKDGEITPWNFDDKVDRAESANNFIKRMKSKDTYLLGEDVVPKESMLYQKYEVLNELNNLRINDSGLSDSFEDVKLKQAIYNDLFKKQKIVKITDLQNYLVQNHKYLVKPKISGLADENRFLSSLSTYSDLKTIFGDKVDDRTYFNDFEKMVEYSTVFEDGHVYKQKLDEFTWLTKEEKDKIGKKRYRGWGKLSKKLLTGLRDKNNHTIMDNLWETNRNFMQIQTADEFPKQISEENERHLKGSVSDAINDMYTSPANKKAIRQVLRVVDDIQKAMGYAPSSISLEFAREDGPSVRTVSRANRMKSIYEKYASEVSEEVMKDLDGVIKDKKGLNDRLYLYFEQQGKDMYSGHPLDFDKVISGQEYDIDHILPQAVIKDDSLDNRVLTTKALNNDVKSKGVPCRMFNGMHSFWKNLYDKGFISRRKFNNLTTNPENIDKYKMKGFVNRQLVETRQIIKLVANVLNDKYQNDDVDIIEVRAELTHDVRKHFKFYKNRNVNDYHHAFDAYLTNFVGQYLFKKYPNLRPLFDYNDFMKVSDNVFKQLRGNNFLGEFLNKTGDIISTDGNFVLNKEEMINKLNKAYAFKKILVTKEVVQRTGAMFDETVYSAKSGKTLIKLKKDRDTSIYGGHSGNKDAYMVIVYTGKGYKVIGIPVRYAERLDSLRKNDVDGFNDMLNRLIESKFSKKSKNKQFRIVIDKVLYNQLIQDGNLLFTLGSAAYQHNFRQLFLDKKALEILDKVATPKPTDDDLIMVYDQILERVDKYFELYDNGGCREALHKGRELFCKLPVSKRNEKDVTKRDMIYTILDGLHANGKTVSCLEIGKGGAFGKFQKQNGINLSENAKLIYQSPTGLFERVVYLKDL

SEQ ID NO: 131 - protein, 1151 aa, unidentified
  REGION 1..1151: note = LPG10196
MQIDAHQSCDMQNDKPYVIGFDLGDFSVGMSAIQIDSEGLPTRILNSQSVIHDSGIDPSQRKYGTSRKKEAGIARRIRRMRRYRKHRLNKLSQILSTNGYKRMNIRQFHGPDIWLIRASAADQYIADEDARRTAIRVSCEHIARHRGWRNPYQNPRVLLHAQPDSATYEQLRENAADHMGGVMPADNETPAQIVRDVLDYHRGEPAIRLRHTGKVTRKTKKNQHTPCAWVLPERMMQSDNAYELRRILETQQVPEPLIEQLILAVFYQISPKGSAEHLAGKDAIDPTRVRAPKCSLAFQRYRIADVISNLRVGIEQRRLTVEEKQAIARLLASDNKQTCEYETWAAVAETLGHPATWLKGIGEPAPDGEGNVTNRPPHIDILHRISQLDDNTLRVTLLNWWDSHTTEDKESFIRVLSNTVNIETVADDPAYKAALQLLDGLDDTQLNKLDAMNLESGRAAYSENTLNKLADWMLTHEGDVTDAREQVFHIARDWRPPQEPVGAPLGNPPVDRSLKIAARWLDAIEQRYGKPISVQVEHTRKAFTSVETRMKNQKEWQDSSRCKARQALREQLAKQGGSISENSLMRREAITRQNGECLYCGASIDITTCQMDHIVPRKGSGCTNTKDNLVAVCPTCNQEKSNMPFPAYCATESARMRGVSMKDAIHRVHHLNLDDQGYKSKAQKALKDGIIRRLKQTEADDPIDGRSLESTSWMAVELYKRLTWRYAHNGGTPVTVNVYRGELTAEARSIMRHAAGMDFHMIGGHGKTRLDRRHHAIDASVIAMMTPAAAQAIAARISMHEAETLTGMRTDWRTYPANPTAKYQHWLESMRRLMNLLNTALDDDRIRVLRNQRYRLGSSAAHKDTITPLTYRELGDPLDASLIRHASTPALYTALTHLPDYNDADGLPANPERRINVNGTIIDSDDTIAFFTGDAAQILVNDGGAAVGSSIHHARVYRYYTLLKSGKRKYAYGWIRVYQQDLIHAHGDLFTEPLTACTLSLRYADQTLVSAIRDGRAEYLGHLLAGDEIVVDFTDGKGAVGKFNEFFAKDIREQPSAMRRWTVTGFPTLVQTSLRPCYLSGEGLAKLEERGGEPVPKEVEKILAGSGGYTPSVNTVFSLHPAIIHRNVFGEERWGTVSGLPTSWRVNDTQK

SEQ ID NO: 132 - protein, 1382 aa, unidentified
  REGION 1..1382: note = LPG10197
MIKKDYNLGLDIGATSVGFAGIDEQYDPIKLKGKTVVGVNLFEEGKTAADRRGFRTTRRRLSRRKWRLSLLEEFFDPYITPVDPTFFARLKESNLSPKDNNKNFSGSLLFSDITDQKFYEEYPTIYHLRYALMTENKKFDLRAIFLAIHHMIKYRGNFLNSTPVAHFDTSKINFASDLNELNSLYLNEDPNNIFEINLQNVKEISDILLDHSIKKFDKQKQVAKLLLTSQNDKELDKINKQIATQISKAILGYNFSLNEILKIEVEDKSKWKLNFSSADIDDKLPDLISELDESQESILNIILSLYSRLTLNGIVPSGMSLSEAMIDKYGTHKEHLDLLKKYLKTLPIKNRKEIAEAYAEYVGNSLKKSGHISQEEFYKAVKKNLDKSETAQAILGLISEEKFMPKQRTNQNGVIPYQLHQKELDQIIVNQSQYYPWLAELNPVTEHKDAKYKLDELIAFRVPYYVGPLIDPKTTPQTEQGNKNASFAWMVRKENGQITPWNFDKKVDRISSANNFIKRMTTKDTYLIGEDVLPAHSLIYERFKVLNELNMIRVNGKKLSVSVKQNLYNDLFKQQKTINRKKLANYLQANLGIPERPQITGLSDPEKFNSQLSSYIDLQKILGSEIVDDPNKQDDLEKIIEWSTVFEDSRIYKVKLQEIGWLTEKQKNELVSHRYQGWGRLSRKLLVELKDKNGRSILDILWNSQRTFMEIQSRPEFAEQITNENQDKLTEDNYEDVLEDAYTSPQNKKAIRQVIKVVDDIVKAAGKAPKFISLEFARSDERSDRVKSRKTQIQKIYETTAKELLKDDQLIKELGSVSDLSDRLYLYFTQLGRDMYTGKPINIDEISTMYDIDHILPQAFLKDDSLDNRVLVRRQDNNAKSDTVPALKFGKMKPFWNKLQKHGLISKRKLNNLQTNPESIDKFKAVSFVNRQLVETRQVIKLAANILASRYPDSKIIEVKASLTHQMRESFNLIKNRDVNDYHHAVDAYLSAFVGQYLYNRYPKLQPYFVYGQFKKFDKQSTRIGMKTNHFNFLYDLEPEGKNVKIKKPTKIINKETGEIIGDRDELVAKLNRVYNFKYMLISQEVYTRSGALFDQTIYPANSGKKLIPLKQNKTTAIYGGYSGSKAAYMSIIRLRDKKGGTYRIVGIPVRAVNKLNQAKKKSNEKYLAELKAVIEPQIAKTKKDRKTGQRVLVPQEFDVIIPEVMYRQLIVDGDQKFTLGSSTYQYNARQLVLDSESLVTLSKNFIESNSVTSEIKNNRLIKVYDDILDKVNKYFSLYDKNKFRQRLNEGREKFIRLPIDSKFKNNKKIAVGKREILQNILIGLHDNAGMGNLKVLGINTPFGMIQTSNGITLSPNACLIYQSPTGLFERKVYLNTISSLK

SEQ ID NO: 133 - protein, 1092 aa, unidentified
  REGION 1..1092: note = LPG10198
MAYTMGIDVGIASCGWAIVDLERQRIIDLGVRIFEKAENPKNGEALAVPRREARSSRRRLRRKKHRIERLKYMFIRNGLAVDIQHLEQTLRSQNEIDVWQLRVDGLDRVLTQKEWLRVLIHLAQRRGFQSNRKTDGSNEDGQVLVNVTENEKLMEEKDYRTVAEMMVKDGKFSDHKRNKNGNYHGVVSRASLLVEIHTLFESQRQHHNFFASKDFELEYVNIWSSQRPVATKDQIEKMIGTCTFLPKEKRAPKASWHFQYFMLLQTINHIRITNVQVTRSLNKEEIEQVVNMALTKSKVSYHDIRKILDLSEEYQFVGLDYGKDDEKKKVESKETIIKLDDYHKLNKIFNEVELAKGEAWEAVDYDTVAYALTFFKDDEDIRDYLQNKYKDSKNRLVKNLSNKEYTNELIEKVSTLSFRKVGHLSLKALRKIIPFLEQSMTYDKACQAAGFNFQGISKKKRSVILPVIDQISNPVVNRALTQTRKVINALIKKYGSPETIHIETARELSKTFDERKNITKDYKENRDKNERAKKHLSELGIINPTGLDIVKYKLWSEQQGRCIYSNQPISFERLKESGYTEVDHIIPYSRSMNDSYNNRVLVMTRENREKSNQTPYEYMGNDTQRWHEFEQRVTTNLQIKKEKRQNLLLKGFTNRRELEMLERNLNDTRYITKYLSHFISTNLEFSPSDKKKKVVNTSGRITSHLRSRWGLEKNREQNDLHHAMDAVVIAVTSDSFIQQVTNYYKRKERRELNGDDKFPLPWKFFREEVIARLSPNPKEQIEALPNHFYSEDELADLQPIFVSRMPKRSITGEAHQAQFRRVVGKTKEGKNITAKKTALVDISYDKNGDFNMYGKETDPATYEAIKERYLEFGGNAKKAFSTDLHKPKKDGTKGPLIKSVRIMENKTLVHPVNKGKGVVYNSSIVRTDVFQRKEKYYLLPVYVTDVTKGKLPNKVIVAKKGYDDWIEVDDSFTFLFSLYPNDIIFIRQNPKKKISLKKRIESHSISDSKEVQEIHAYYKGVDSSTAAIEFITHDGSYYAKGVGVQNLDCFEKYQVDILGNYFKVKGEKRLELETSDSNHKGKDVNSIKSTSR

SEQ ID NO: 134 - protein, 1086 aa, unidentified
  REGION 1..1086: note = LPG10200
MPFRQPVSYAFDMGTNSIGWCVFRLSAAGHPVAIADAGVRIYSDGRDPQSKTSLAVARREAKAAARRRDRTKRRQKATLRTLAEYGLMPGGKDERERLLRETADSADRNAPANDPLNLRARALTEKLPLHHIGRALFHLGQRRGFKSNRKTDRRDNDKGKIAIGIDRLRDAIREAKAETLGVFLASRRAQGLHVRLRAGSSVILDDGYDFYPVRSLLEEEFRHIWDAQAVHYPDVLTEARGEHLFKVIFHQRPLKKPRIGSCTFNPLEQRLAKAHPLFQAFRLYKEVNELEVVAPDLSQRKLTLDERDALVLKLRGAKTAKYKTLRKDLKLTPDMRFNKESENRVDMAGDEVTAALSAKGLFGPRWNTLSMDSQWKVIERIQEEENPFVLHQWLVETHGLSDDAAEAVAACHLPEGYGRLGHTALSTMLEELRADVIPEAKAAERAGYNHSYFGTGEIFDELPKYQEVVARSIPPGTGDLEDEYDVRKGRITNPTVHIGLNQLQRLVNGLIRRFGKPAEIAVELARDLKTNEKKKTEINRRIGENTRAARQRSEKIAELRKDTPALVDNGYNRLLLKLWEELNPAKPEDRCCIYTGKPISISMLFSGAVDVDHILPYSRTLDDGQGNKLLCLKEANRVKRNRAPSEVTEWANHYDEILERANRLPKPKRWRFARDVMADFDADSGFLDRQLTDTQYLSRLAREYLCSLYPEKHEQWRVRVIPGRMTEMLRRHWGLNTLLPDHNYSDAKNRNDHRHHAIDAAVVGVTTRSMLQRISTEAARREEQELEDVVKGIPVPWEHFRDDLQQALNNIVVSHKPDHGTVGLDDKGKWQTAGKLHNDTAYGLTGEVDARGNTIVVRRKMLLSLTDKDIPAIRDDELRARLYSAAGGLSGKELQQALLDFARNDPKYRGIRRVRVTETLAVIPIRDKDGNVYKGYKGDANYRYDVWEMKDGKWQAEVISMFDAHQKGWESPVRKANPTARKVLSLQQNDMVAYEHPSDGYTIARVVKFASSGQIVFARNNEGGSLKARDANRDDPFKYFSKTANGLREIKARQIRIDETGRVYDPGPRDRESRMIGNQKLKTIAI

SEQ ID NO: 135 - protein, 1076 aa, unidentified
  REGION 1..1076: note = LPG10203
MKYSIGLDIGIASVGWAVINEDLGRIENMGVRIFDAAEHPKDGSSLSTPRREARSARKRLRRRRHRVERTRYFMIQKGLLTQVQMEQLYDWKHGDLDIWLIRVNALERKLTNREFARVLIHHTKNRGFKSNRKSELKEGDNGVVLSAVQENKRLMEEKGYQTIAEMLLLDTKFKGLKRNKGGDYSHVVARSELEHEIRLVFAKQREFGHRFASVENEEGYIAIWSSQRPFATKDDISKKIGYCTLEPKERRAPKSTYTFERFRALDKLARLRILSSTKENRALTDDERELILNSLFSKKEMKYKELRKLLKLQDTDRFNEIFYDPEATADKNENRTFLSLESQYKIRSIIQQVEGKKINDSYRPIDFDTIAYALTVFKDDQDIRDYLLNDYVESNGKRTTNLANRVYKEEVIEELLQLSFAKFGHLSLKALKNILVHMEQGLPYYKACEEAGYQFNSNQNKDKQRILPVIPAKEIANPVVVRSLSQVRKVVNGIIKKYNIPSAMYIELARDMGRVYKERRDIEKQYDKNRQINEAAKERIIEYSEGRFTPKAHDILKYKLWQEQGGRCAYSFAPIPIESLFNIGYVEVDHIIPYSRSFDDSNNNKVLVLSAENQNKRNQTPFEYFGHDVVKWEQFKSFVTTLKVAKRKKMLLLKQNFDEQQAEEFRSRNLNDTRYITRFIKNFIEDNLQFREEEGNKQHVFTLNGAYTSLMRKRWGFNKNRRENDLHHALDAVLIAVSWPFKHQVSAYFNRREEYARNQLKREGEYFPEPWPGFIHELEIRMMQDEDKMKLALESLDLKTYDDDFINRVKPIFVSRMPKRSIKGQIHEATLKRVRGNTEDGYIRTVKKVRLDQIPFEKNGNFPMYGKETDLKTYSAIKKRFLEYGDRKKAFATPLYKPAKDPSKAPIIRSVKIEEKANRVVHLDEKTVADNASIAKTEVFRHRKTGQYYLTPIYVADVVNGIIPDRLISTKKPYSEWRRITDEYEFLFSLYPNDLIRIKMPKEKETKNFMKETHIWQEGFMYYRGVHSGSAGVRMINHMNSFEDEIGVQKLELFEKYQVDPLGGITKVHGEKRYGI

SEQ ID NO: 136 - protein, 1077 aa, unidentified
  REGION 1..1077: note = LPG10204
MKYSIGLDIGIASVGWAVINEEVNRIENLGVRIFDVAENPKDGSSLATPRREARSARKRLRRRRHRIERTRQFIVKQGLLTQVQMEQLYDWKSEDLDIWLIRVNAIERKLMDREFARILIHMVKNRGFKSNRKSELKEGDNGVVLSAVQENKQLMEEKGYQTIAEMLLFDERFEGRKRNKGGAYSHVVSRSELESEIRLIFQKQREYGHHFARVENEEVFINIWASQRPFATKDDIAKKIGTCTFEENEKRVPKSTYTFERFRAFDKLNRLRIVSTVAPTRALTEEEKSLILDSLFSKKEVKYKELRKLLKLQDEQRFNELYYDPNETNDKNENRTFLSLESQYKIRKVIQQVEGKNINDSYRPVDLDTIAYALTTFKDDHDIRDYLQNRYVSSHGKKTENLANRVYKEELIEELLQLSFSKYGHLSLKALKNILPHMEKGIPYHKACEQAGYQFSKKADKDKEYFSPVIQAKDIANPVVVRSLSQVRKVINGIIKKYGSPSAIYIELAREMGRVYKERKEIEKQYNKNRDINEGAKQHILELHPEFGHPRGHDILKYKLWKEQDGRCAYSFEPISMERLFHIGYAEVDHVIPYSRGFDDSNSNKVLVLAAENQNKQNRTPHEWFGHDETRWQQFVSFVTTMKVSKKKKGLLLKRNLDEEQAEEFRSRHLNDTRYITRYIKSFIEDNLQFRLEEGKKQYVHTVNGAYTSLMRKRWGFNKNRQENDLHHALDAVIIAVSLPFKHRVSAYFKRREEYAHNQLKREREFFPEPWPGFVHELEIRMMQNAEKMKLGLESLDLKTYDESFLREVQPIFVSRMPKRSIKGQIHEATLKRVRGNTEDGYIRTVKKVRLDQIPFDKNGDFPMFGKETDMKTYEAIKNRYLEYKKDKKKAFLEPLYKPAKNPENAPIIRSVKIEDKANRVVMLDDKTAADNASIVKTEVFRHRETGKFFLTPIYVSDVLSNRIPEKFITPGKPYSQWKDITDEYEYLFALYPNDLIRVKMPKEKETKTNIGEKHVWQENFMYFKGVHSADAGIKLIDHMNSFEDKIGTQRLVAFEKYQVDPLGELTKVHGEKRHGI

SEQ ID NO: 137 - protein, 1077 aa, unidentified
  REGION 1..1077: note = LPG10205
MKYSIGLDIGIASVGWAVINEEIDRIENLGVRIFDAAENPKDGSSLATPRREARSTRKRLRRRRHRIERARQFIVQQGLLTQVQMEQLYDWKSEDLDIWLIRVNAIERKLMDREFARILIHMVKNRGFKSNRKSELKEGDNGVVLSAVQENKQLMEEKEYQTIAEMLLFDEKFEGRKRNKGGAYSHVVSRSELESEIRLIFQKQREYGHHFAREENEEAFINIWASQRPFATKDDIAKKIGTCTFEENEKRVPKSTYTFERFRAFDKLNRLRIVSTVAPTRALTEEEKSLILDSLFSKKEVKYKELRKLLKLQDEQRFNELYYDPNETNDKNENRTFLSLESQYKIRKVIQQVEGKNINDSYRPVDLDTIAYALTTFKDDHDIRDYLQNRYVSSHGKKTENLANRVYKEELIEELLQLSFSKYGHLSLKALKNILPHMEKGIPYHKACEEAGYQFSKKADKDKEYFLPVIQAKDIANPVVVRSLSQVRKVINGIIKKYGSPSAIYIELAREMGRVYKERKEIEKQYNKNRDINEGAKQHILELHPEFGHPRGHDILKYKLWKEQDGRCAYSFEPISMERLFHIGYAEVDHVIPYSRGFDDSNSNKVLVLAAENQNKQNRTPHEWFGHDETRWQQFVSFVTTMKVSKKKKGLLLKRNLDEEQAEEFRSRHLNDTRYITRYIKSFIEDNLQFRLEEGKKQYVHTVNGAYTSLMRKRWGFNKNRQENDLHHALDAVIIAVSLPFKHRVSAYFKRREEYAHNQLKREREFFPEPWPGFVHELEIRMMQNAEKMKLGLESLDLKTYDESFLREVQPIFVSRMPKRSIKGQIHEATLKRVRGNTEDGYIRTVKKVRLDQIPFDKNGDFPMFGKETDMKTYEAIKNRYLEYKKDKKKAFLEPLYKPAKNPENAPIIRSVKIEDKANRVVMLDDKTAADNASIVKTEVFRHRETGKFFLTPIYVSDVLSNRIPEKFITPGKPYSQWKDITDEYEYLFALYPNDLIRVKMPKEKETKTNIGEKHVWQENFMYFKGVHSADAGIKLIDHMNSFEDKIGTQRLVAFEKYQVDPLGELTKVHGEKRHGI

SEQ ID NO: 138 - protein, 1071 aa, unidentified
  REGION 1..1071: note = LPG10207
MKKLDYRIGLDIGTNSIGWGIIELSWNRDKEQYEKVRIVDKGIRMFDKAEIPKTGASLAEPRRIARSSRRRLNRKSQRKKDIRNLLIQHEVINQKELDSLYPLSKKSIDIWDIRLDGLDRLLNRLEWARLLIHLAQRRGFKSNRKSELKDEETGKVLSSIQANEKRLSLYRTVGEMWMKDADFSKYDKRRNSPNEYVFSVNRVDLEKEIVTLFEAQRNFQSSYASVDLQETYLQIWAHQLPFASGNAILNKVGYCSLLKGKEKRIPKATYTFQYFSALDQINRTRLGPEFQRVTTEQRNLILDKVFQRTDYYKKKTIPEVTYYDIRKWLALDETIQFKGLIYDPNEELKKIEKKPFINLKPFYEIKKIVANYTEKTNEAFSTLDYDTVAYALTVYKTDKDIRSYLKSPHNLSKRCYDDQLIEELLSLSYTKFGHLSLKAINYVLPIMQEGRTYKEAADQLGFDTTHLKKEKRSKFLPPISDEITNPIVKRALTQARKVVNAIIRRYGSPHSVHIELARELSKSREERNKIKAAQDENYKKNKGAISILSEHGILDPTGYDIVRYKLWKEQGERCAYSLKTIPPDTFFNELRKERNGSPILEVDHILPYSQSFIDSYDNKVLVYSDENRKKGNQIPYFYFLETNKDWDSFEKYVRSNKLFSKKKSGYLLKKAYLPRESELIKERHLNDTRYASSFLKNFIEQNLQFKEIEGNPRKKHVQTVNGIITAHLRKRWGLEKDRQETYLHHAMDAIIVACTDHHMVTKVTEYYQTKESNKSVKKPYFPLPWEGFRDELLSHLASQPIAKKISEELKAGFQPSNYILVSRMPKRSITGAAHDQTIMKKGGIDKKGKTIIIKRLQLKDIKFDENGDFKMVGKEQDIATYEAIRQRYLKHGKNSKKAFETPLYKPSKKGKGNLITKVKVEVQTKSFVREVNGGVAQNGDLIRIDLFEKDYKYYMVPIYVLDTVCSELPNKVVTSSKGYEQWLTLDNSFMFKFSLYPYDLVRLIKGDEDRFLYFSTLDIDSDRLIFKDVNKPSKKNEYRYSLKTIEDLEKYDVGVLGDLSLVRQEVRRKFQ

SEQ ID NO: 139 - protein, 1077 aa, unidentified
  REGION 1..1077: note = LPG10208
MKYSIGLDIGIASVGWAVINEEVNRIENLGVRIFDVAENPKDGSSLATPRREARSARKRLRRRRHRIERTRQFIVKQGLLTQVQMEQLYDWKSEDLDIWLIRVNAIERKLMDREFARILIHMVKNRGFKSNRKSELKEGDNGVVLSAVQENKQLMEEKGYQTIAEMLLFDERFEGRKRNKGGAYSHVVSRSELESEIRLIFQKQREYGHHFARVENEEVFINIWASQRPFATKDDIAKKIGTCTFEENEKRVPKSTYTFERFRAFDKLNRLRIVSTVAPTRALTEEEKSLILDSLFSKKEVKYKELRKLLKLQDEQRFNELYYDPNETNDKNENRTFLSLESQYKIRKVIQQVEGKNINDSYRPVDLDTIAYALTTFKDDHDIRDYLQNRYVSSHGKKTENLANRVYKEELIEELLQLSFSKYGHLSLKALKNILPHMEKGIPYHKACEEAGYQFSKKADKDKEYFLPVIQAKDIANPVVVRSLSQVRKVINGIIKKYGSPSAIYIELAREMGRVYKERKEIEKQYNKNRDINEGAKQHILELHPEFGHPRGHDILKYKLWKEQDGRCAYSFEPISMERLFHIGYAEVDHVIPYSRGFDDSNSNKVLVLAAENQNKQNRTPHEWFGHDETRWQQFVSFVTTMKVSKKKKGLLLKRNLDEEQAEEFRSRHLNDTRYITRYIKSFIEDNLQFRLEEGKKQYVHTVNGAYTSLMRKRWGFNKNRQENDLHHALDAVIIAVSLPFKHRVSAYFKRREEYAHNQLKREREFFPEPWPGFVHELEIRMMQNAEKMKLGLESLDLKTYDESFLREVQPIFVSRMPKRSIKGQIHEATLKRVRGNTEDGYIRTVKKVRLDQIPFDKNGDFPMFGKETDMKTYEAIKNRYLEYKKDKKKAFLEPLYKPAKNPENAPIIRSVKIEDKANRVVMLDDKTAADNASIVKTEVFRHRETGKFFLTPIYVSDVLSNRIPEKFITPGKPYSQWKDITDEYEYLFALYPNDLIRVKMPKEKETKTNIGEKHVWQENFMYFKGVHSADAGIKLIDHMNSFEDKIGTQRLVAFEKYQVDPLGELTKVHGEKRHGI

SEQ ID NO: 140 - protein, 1108 aa, Brevibacillus sp.
  REGION 1..1108: note = APG09748
MAIRSIKLKLKTRTGPEAQNLRKGIWRTHRLLNEGVAYYMKMLLLFRQESTGGQTKKELQEELVRHIREQQQKNRADKNTQALPLDKAFAALRQLYELLVPSSIGQSGDAQIISRKFLSPLVDPNSEGGKGTSKAGAKPTWQKKKEANDPTWEQDYEKWKKRREEDPTASVITTLEEYGIRPIFPLYTNTVADIAWLPLQSNQFVRTWDRDMLQQAIERLLSWESWNKRVQEEYSKLQEKMTQLNEQLEGGQEWISLLEQYEEQREQELIENMTAANDKYRITKRQMKGWNELYEQWSTVLPNASHEQYREALKRVQQRLRGRFGDAHFFQYLMKEEHHLIWKGNPQRIHYFVARNELKKRLEEAKQNATMTLPDARKHPLWVRFDARGGNLQDYYLTAEADNPRSRRFVTFSQLIWPNESGWMEKQDVEVELALSKQFYQQVTLQKNDKGKQEIEFKDKGSGSTFSGHLGGAKLQLERGDLEKEEKDFEGGEIGSVYLNIVIDFEPLQEVKNGRLQSPYGQVLQLVRRPNEFPKVTTYKSEELVEWIKSSTKDSAGVESLESGFRVMSIDLGLRTAAATSIFSVEESNDANAAGFSYWIEGTPLVAVHKRSYMLKLPGEQVEKQVREKRDERQDQQRRVRFQIRILSQVIRMAKKQNRERADELDHLSQALEKQKSLLDQTDRTFWNGIVCDLTDALREKEGGWEQAVVQIHRKAEEHVGKVVQAWRKRFDADERKGIAGLSMWSIEELDSLRKLLISWSRRTRNPREINCFEQGHTSHQRLLTHIQNVKEDRLKQLSHAIVMTALGYVYDEKKLEWFAKYPACQVILFENLSQYRSNMDRSTKENSTLMKWAHRSIPKYVHMQAEPYGIQIGDVRAEYSSRFHAKTGTPGIRCKMVSGHDLQGRRFENLQKRLISEQFLTEEQVKQLRPGDIVPDDSGEWFMTLSDGSEGKEVVFLQADINAAQNLQKRFWQRYNELFKVSCRVLIRGEEEYLIPKTKSVQAKLGKGLFVKKTDTVMKDVYVWDSQAKLKGKTTFTEESESPEQLEDFQEIIEEAEEAKGTYRTLFRDPSGVFFPEFVWSTQKDFWSEVKRRLYGKLRERFLMKTR

SEQ ID NO: 141 - protein, 1112 aa, Bacillus sp.
  REGION 1..1112: note = APG02789
MAIRSIKLKMKTNSGTDSIYLRKALWRTHQLINEGIAYYMNLLTLYRQEAIGDKTKEAYQAELINIIRNQQRNNGSSEEHGSDQEILALLRQLYELIIPSSIGESGDANQLGNKFLYPLVDPNSQSGKGTSNAGRKPRWKRLKEEGNPDWELEKKKDEERKAKDPTVKIFDNLNKYGLLPLFPLFTNIQKDIEWLPLGKRQSVRKWDKDMFIQAIERLLSWESWNRRVADEYKQLKEKTESYYKEHLTGGEEWIEKIRKFEKERNMELEKNAFAPNDGYFITSRQIRGWDRVYEKWSKLPESASPEELWKVVAEQQNKMSEGFGDPKVFSFLANRENRDIWRGHSERIYHIAAYNGLQKKLSRTKEQATFTLPDAIEHPLWIRYESPGGTNLNLFKLEEKQKKNYYVTLSKIIWPSEEKWIEKENIEIPLAPSIQFNRQIKLKQHVKGKQEISFSDYSSRISLDGVLGGSRIQFNRKYIKNHKELLGEGDIGPVFFNLVVDVAPLQETRNGRLQSPIGKALKVISSDFSKVIDYKPKELMDWMNTGSASNSFGVASLLEGMRVMSIDMGQRTSASVSIFEVVKELPKDQEQKLFYSINDTELFAIHKRSFLLNLPGEVVTKNNKQQRQERRKKRQFVRSQIRMLANVLRLETKKTPDERKKAIHKLMEIVQSYDSWTASQKEVWEKELNLLTNMAAFNDEIWKESLVELHHRIEPYVGQIVSKWRKGLSEGRKNLAGISMWNIDELEDTRRLLISWSKRSRTPGEANRIETDEPFGSSLLQHIQNVKDDRLKQMANLIIMTALGFKYDKEEKDRYKRWKETYPACQIILFENLNRYLFNLDRSRRENSRLMKWAHRSIPRTVSMQGEMFGLQVGDVRSEYSSRFHAKTGAPGIRCHALTEEDLKAGSNTLKRLIEDGFINESELAYLKKGDIIPSQGGELFVTLSKRYKKDSDNNELTVIHADINAAQNLQKRFWQQNSEVYRVPCQLARMGEDKLYIPKSQTETIKKYFGKGSFVKNNTEQEVYKWEKSEKMKIKTDTTFDLQDLDGFEDISKTIELAQEQQKKYLTMFRDPSGYFFNNETWRPQKEYWSIVNNIIKSCLKKKILSNKVEL

SEQ ID NO: 142 - protein, 1108 aa, Brevibacillus sp.
  REGION 1..1108: note = APG09106
MAIRSIKLKLKTRTGPEAQNLRKGIWRTHRLLNEGVAYYMKMLLLFRQESTGGQTKKELQEELVRHIREQQQKNRADKNTQALPLDKAFAALRQLYELLVPSSIGQSGDAQIISRKFLSPLVDPNSEGGKGTSKAGAKPTWQKKKEANDPTWEQDYEKWKKRREEDPTASVITTLEEYGIRPIFPLYTNTVADIAWLPLQSNQFVRTWDRDMLQQAIERLLSWESWNKRVQEEYSKLQEKMTQLNEQLEGGQEWISLLEQYEEQREQELIENMTAANDKYRITKRQMKGWNELYEQWSTVLPNASHEQYREALKRVQQRLRGRFGDAHFFQYLMKEEHHLIWKGNPQRIHYFVARNELKKRLEEAKQNATMTLPDARKHPLWVRFDARGGNLQDYYLTAEADNPRSRRFVTFSQLIWPNESGWMEKQDVEVELALSKQFYQQVTLQKNDKGKQEIEFKDKGSGSTFSGHLGGAKLQLERGDLEKEEKDFEGGEIGSVYLNIVIDFEPLQEVKNGRLQSPYGQVLQLVRRPNEFPKVTTYKSEELVEWMKASQNHSSGVESLESGFRVMSIDLGLRTAAATSIFSVEESNDANAAGFSYWIEGTPLVAVHKRSYMLKLPGEQVEKQVREKRDERQDQQRRVRFQIRILSQVIRMAKKQNRERADELDHLSQALEKQKSLLDQTDRTFWNGIVCDLTDALREKEGGWEQAVVQIHRKAEEHVGKVVQAWRKRFDADERKGIAGLSMWSIEELDSLRKLLISWSRRTRNPQEINRFEQGHTSHQRLLTHIQNVKEDRLKQLSHAIVMTALGYVYDEKKLEWFAKYPACQVILFENLSQYRSHMDRSTKENSTLMKWAHRSIPKYVHMQAEPYGIQIGDVRAEYSSRFHAKTGTPGIRCKMVKGQELQGKRFENLQKRLVSEQFLTEEQVKQLRPGDIVPDDSGEWFMTLSDGSEGKEVVFLQADINAAQNLQKRFWQRYNELFKVSCRVLIRGEEEYLIPKAKSVQAKLGKGLFVKKTDTVMKDVYVWDSQAKLKGKTTFTEESESPEQLEDFQEIIEEAEEAKGTYRTLFRDPSGVFFPEFVWNTQKDFWSEVKRRLYGKLRERFLMKTR

SEQ ID NO: 143 - protein, 506 aa, Bacillus sp.
  REGION 1..506: note = APG07339
MSTPLQQPHQKSKKTSQMITTRKFKLAIVSDNRNEAYSFIRNEIRNQNKALNAAYNHLYFEHIATEKLKHSDAEYQKHLTKYREVATNKYQDYLKAKEKVNASKDDEKLQKRVDKAREAYNKAQEKVYKIEKEFNKKSMETYQKVVGLSKQTRIGKLLKSQFTLHYDTEDRITSTVLSHFNNDMKTGVLRGDRSLRTYKNSHPLLVRARSMKVYEENGDYFIKWVKGIVFKIVISAGSKQKANIGELKSVLINILNGHYKVCDSSISLNKDLILNLSLNIPVSKENVFVPGRVVGVDLGLKIPAYVSLNDTPYIKKGIGNIDDFLRVRTQLQSQRKRLQKTLECTSGGKGRSKKLKGLDRLKAKEKNFVNTYNHFLSKKIIQFAVKNNAGVIHLEELQFDKLKHKSLLRNWSYYQLQTMIEYKAEREGIEVKYVDASYTSQTCSKCGHYEEGQRVLQDTFTCKNKECKGYVHKVNADFNASQNIAKSTDIIRCTEMAKNNDIEKNA

SEQ ID NO: 144 - protein, 506 aa, Bacillus sp.
  REGION 1..506: note = APG09624
MSTPLQQPHQKSKKTSQMITTRKFKLAIVSDNRNEAYSFIRNEIRNQNKALNAAYNHLYFEHIATEKLKHSDEEYQKHLTKYREVATNKYQDYLKVKEKVNASKDDEKLQKRVDKAREAYNKAQEKVYKIEKEFNKKSMETYQKVVGLSKQTRIGKLLKSQFTLHYDTEDRITSTVLSHFNNDMKTGVLRGDRSLRTYKNSHPLLVRARSMKVYEENGDYFIKWVKGIVFKIVISAGSKQKANIGELKSVLINILNGHYKVCDSSISLNKDLILNLSLNIPVSKENVFVPGRVVGVDLGLKIPAYVSLNDNPYIKKGIGNIDDFLNVRTQLQNQRKRLQKTLECTSGGKGRSKKLKGLDRLKAKEKNFVNTYNHFLSKKIIQFAVKNNAGVIHLEELQFDKLKHKSLLRNWSYYQLQTMIEYKAEREGIEVKYVDASYTSQTCSKCGHYEEGQRVLQDTFTCKNKECKGYVHKVNADFNASQNIAKSTDIIRCTEMAKNNDIEKNA

SEQ ID NO: 145 - protein, 506 aa, Bacillus sp.
  REGION 1..506: note = APG03003
MSTPLQQPHQKSKKTSQMITTRKFKLAIVSDNRNEAYSFIRNEIRNQNKALNAAYNHLYFEHIATEKLKHSDAEYQKHLTKYREVATNKYQDYLKAKEKVNASKDDEKLQKRVDKAREAYNKAQEKVYKIEKEFNKKSMETYQKVVGLSKQTRIGKLLKSQFTLHYDTEDRITSTVLSHFNNDMKTGVLRGDRSLRTYKNSHPLLVRARSMKVYEENGDYFIKWVKGIVFKIVISAGSKQKANIGELKSVLINILNGHYKVCDSSISLNKDLILNLSLNIPVSKENVFVPGRVVGVDLGLKIPAYVSLNDTPYIKKGIGNIDDFLNVRTQLQNQRKRLQKTLECTSGGKGRSKKLKGLDRLKAKEKNFVNTYNHFLSKKIIQFAVKNNAGVIHLEELQFDKLKHKSLLRNWSYYQLQTMIEYKAEREGIEVKYVDASYTSQTCSKCGHYEEGQRVLQDTFTCKNKECKGYVHKVNADFNASQNIAKSTDIIRCNEMAKNNDIEKNA

SEQ ID NO: 146 - protein, 506 aa, Bacillus sp.
  REGION 1..506: note = APG05405
MSTPLQQPHQKSKKTSQMITTRKFKLAIVSDNRNEAYSFIRNEIRNQNKALNAAYNHLYFEHIATEKLKHSDEEYQKHLTKYREVATNKYQDYLKVKEKVNDSKDDEKLQKRVDKAREAYNKAQEKVYKIEKEFNKKSMETYQKVVGLSKQTRIGKLLKSQFTLHYDTEDRITSTVISHFNNDMKTGVLRGDRSLRTYKNSHPLLVRARSMKVYEENGDYFIKWVKGIVFKIVISAGSKQKANIGELKSVLINILNGHYKVCDSSISLNKDLILNLSLNIPVSKENVFVPGRVVGVDLGLKIPAYVSLNDTPYIKKGIGNIDDFLKVRTQLQSQRKRLQKTLECTSGGKGRNKKLKGLDRLKAKEKNFVNTYNHFLSKKIIQFAVKNNAGVIHLEELQFDKLKHKSLLRNWSYYQLQTMIEYKAEREGIEVKYVDASYTSQTCSKCGHYEEGQRVLQDTFTCKNKECKGYVHKVNADFNASQNIAKSTDIIRCTEMAKNNDIEKNA

SEQ ID NO: 147 - protein, 506 aa, Bacillus sp.
  REGION 1..506: note = APG09777
MSTPLQQPHQKSKKTSQMITTRKFKLAIVSDNRNEAYSFIRNEIRNQNKALNAAYNHLYFEHIATEKLKHSDEEYQKHLTKYREVSTNKYQDYLKVKEKVNASKDDEKLQKRVDKAREAYNKAQEKVYKIEKEFNKKSMETYQKVVGLSKQTRIGKLLKSQFTLHYDTEDRITSTVLSHFNNDMKTGVLRGDRSLRTYKNSHPLLVRARSMKVYEENGDYFIKWVKGIVFKIVISAGSKQKANIGELKSVLINILNGHYKVCDSSISLNKDLILNLSLNIPVSKENVFVPGRVVGVDLGLKIPAYVSLNDTPYIKKGIGNIDDFLNVRTQLQNQRKRLQKTLECTSGGKGRSKKLKGLDRLKAKEKNFVNTYNHFLSKKIIQFAVKNNAGVIHLEELQFDKLKNKSLLRNWSYYQLQTMIEYKAEREGIEVKYVDASYTSQTCSKCGHYEKGQRVLQDTFTCKNKECKGYAHKVNADFNASQNIAKSTDIIRCTEMAKNNDIEKNA

SEQ ID NO: 148 - protein, 450 aa, Bacillus sp.
  REGION 1..450: note = APG05680
MSIAVKVMKYQIVCPVNVEWKAFETYLRTLSYQSRTIGNRTIQKIWEFDNLSLNHFKETGEYPSAQQLYGCTQKTISGYIYNQLREEYQDINKANMSTTIQKSLKNWNSRKKEIWRGEMSIPSFRSDLPIDIHGNSIQLIKEKSGDYFANVSLFSSKFIKENDLPNGKILVKLSTRKQNSMKVILDRLINSTYSKGACMLHKHKNKWYLSITYKATKKEGHKFDEELIMGIDMGKINVLYFAYNKGLVRGAISGEEIEAFRKKIEYRRISLLRQGKYCSENRIGKGRKKRIKPIEVLNDKITKFRNATNHKYANYIVQQCLKYNCGTIQLEDLQGISKEQTFLKNWTYFDLQEKIKNQANQYGIKVVKIDPSYTSQRCSECGYIHKNNRQDQSTFECQHCSFKVHADYNAAKNISIYNIEKVIQKQLELQEKLNLTKYKEQYIEQMENIN

SEQ ID NO: 149 - protein, 506 aa, Bacillus sp.; identical to SEQ ID NO: 147
  REGION 1..506: note = APG02119

SEQ ID NO: 150 - protein, 450 aa, Bacillus sp.
  REGION 1..450: note = APG03285
MSLAVKVMKYQIVCPVNVEWKVFETYLRTLSYQSRTIGNRTIQKIWEFDNLSLKHFKETGEYPSAQQLYGCTQKTISGYIYDQLKEEYKDINKANMSTTIQKTLKNWNSRKKEIWRGEMSIPSFRSDLPIDIHGNSIQLIKEKGGDYIASVSLFSSKFIKENDLPNGKILMKLSTRKQNSMKVILDRLINSTYSKGACMLHKHKKKWYLSITYKSNIKEELKFDEDLIMGIDMGKINVLYFAFNKSLVRGAISGEEIEAFRKKIEHRRISLLRQGKYCSGNRIGKGREKRIKPIDVLNDKVAKFRNATNHKYANYIVQQCLKYNCGTIQLEDLKGISKEQTFLKNWTYFDLQEKIKNQANQYGVKVVKIDPSYTSQRCSECGYIHKDNRQDQSTFECLQCSFKAHADYNAAKNISVYTIEKVIQKQLELQEKLNLTKYKEQYIEQIKNIN

SEQ ID NO: 151 - protein, 486 aa, Bacillus sp.
  REGION 1..486: note = APG04998
MITSRKIRLSIVSDNATEAYNFIRKEMREQNKALNVALNHLYFNSIARQKILLADEAYQQKLKDAINSQEKSFNTLKELERKQCIEEDFEKKQTLKERLIKAKNAYEKAKEKVSHLRKSRSKDSFQEYKNIIGQVEQTHLRDIISSQFNLHSDTKDRLTMIANQDFKNDIAEVLSGNCSLRTYKKNNPLYIRGRNTVLYKEGNEFFIKWIKGIVFKCILGVKNQNKTELYKTLECVLAGNYKICDSSMNFNQQNKLIMNLTLNMPDKDENRKVPGRIAGIDLGLKIPAYFAVNDAPYIRKALGKIEDFLKVRTSIQSQKRSLERALQSSKGGKGRKKKLRALDQFKGKEKRYVTTYNHFISKKIISLAIQYGVEQINLELLTLKETQKKSLLRNWSYYQLQQFIEYKAKREGILIKYVDPFNTSQTCSKCDHYEGGQREKQANFLCKSCGFEENADFNAARNIAKSKNYITRKEESEYYKRNNEIA

SEQ ID NO: 152 - protein, 451 aa, Bacillus sp.
  REGION 1..451: note = APG07078
MSVMIKIMKYQILCPTNVDWSTFEKNLRDLTYQVRTISNRTIQQLWEFDALSYDYFKETGTSPTVQDLYKCTQKKIDGYIYHVLQSKYPDVHKGNMSTTLQKIIKTWKSRRSEIRKGEMSIPSFRNQLPIDLHNNSVEVTKEKNGDYIAGLSLFSRDFHKENSDVPKGKIFVKLATKKQKSMKVILDRLISGTYSKGACMIHKYKNKWYLSITYKFNSITENKFDENLIMGIDMGGVNTVYFAFNEGFVRSNIRSDEIRAFNERIRQRRINLLNQSKYCSDSRTGKGRAKRLQPIDVISNKIAQFRNSTNHKYANFIVKQCLKYNCGRIQIEHLKGISKDDKVLKDWTYYDLQEKIKKQAQAYGIEVITIAPAYTSQRCSQCGYISNENRCTQAVFECKQCEYKTHADYNAAKNISTYDIENIINKQLAVQSRLHSKKYMEDHIEELGYSG

SEQ ID NO: 153 - protein, 599 aa, Gordonia sp.
  REGION 1..599: note = APG06369
MAITVHTMGAHYRWEIPEQLRAQLWLAHNLREDLVTLQHEYEARTKEVWSSFPDVAATEDRLTAAELEAEALAEKVKSERIRQRTKRVTGPVADQLAAARKTAKEARIARRAAIAAVRDTAKAQLNELSDELKAAHKRLYAEYCQSGHLYWATFNATLDHHKTAVKRMQQLRAAGRPAQMRHHRFDGTGTIAVQLQRQSGQPQRTPALIGDPEGKYRNVFYSPWVDPDQWDTMTRSEQRKAGRVTVTMRCGSTDDGPAWIAVPVQQHRMLPADADITGAQLTVTRKGSATHVKIAVTARVGEPEPITDGPTVAVHLGWRDTDTGTVVAHWRASEPLDVPFDMRDIMPTDPGGRTGTVVIPTRIVDRIESAAGIASQRGDAQNEMKRQLVEWLTEVGPQPHPTRDGEEISAADAARWRNPGRFAALAMAWRDNPPNRGEQIAYVLESWRATDKGLWNRQEGGRRKALGHRTDIYRQVAALIADQAGVVVVDDTSIADIAARPTELPNEVEARIARRRGSAAPGELREAVRSAAVRDGVGVEVVAHKGLSRTHAACGHENPADDRYMTVGVVCDGCGRTYDQDLSATLLMLQRATSTAAAT

SEQ ID NO: 154 - protein, 553 aa, Micrococcus sp.
  REGION 1..553: note = APG03847
MTTTTGTDLVPRLRAFKHRLDPNPAQATLLAQYAGAARVAYNMLTAHNRAALAASAARRTELAETGLAGPELAARMKAERAADPTLRVASYQSYSTTHLTPLIRRHREAAAAIAAGADPAEAWTDERYAEPWMHTVPRRVLVSGLQNAAKATENWMASASGTRAGARVGLPRFKKKGRSRDSFTIPAPEVIGAAGTPYKRGEPRRGVITDHRHLRLASLGTIRTYDKTSRLVRACRRGAQIRSMTISQAGGRWYASILVADPTPIRTGPSRRQRANDAVGVDLGVKHLAALSTGEVIDNGRPGARQAARLTRLQRAYARTQPGSNRRERVRRQIAALHHGIALRRAGLLHQVSTRLAMDFAVVALEDLNVAGMTRSARGTLEAPGRNVAAKSGLNRAILDAGLGMLRRQLDYKTSWAGSQVKMIDRFAPSSKACSRCGTVKSTLSLAERTFECEACHLVIDRDVNAAINIRAWAVQEERGAGVGLARGRRESRNGRGAAVSGPPSGGAAGQGRGSVKPAPQGVGMSSRATGWSSQPPSTEGESAERGASALAR

SEQ ID NO: 155 - protein, 553 aa, Micrococcus sp.
  REGION 1..553: note = APG05625
MTTTTGTDLAPRLRAFKHRLDPNPAQATLLAQYAGAARVAYNMLTAHNRAALAAGAARRTELAETGLAGPELAARMKAERAADPTLRVASYQSYSTAHLTPLIRRHREAAAAIAAGADPAEAWTDERYAEPWMHTVPRRVLVSGLQNAAKATENWMASASGTRAGARVGLPRFKKKGRSRDSFTIPAPEVIGAAGTPYKRGEPRRGVITDHRHLRLASLGTIRTYDKTSRLVRACRRGAQIRSMTISQAGGRWYASILVADPTPIRTGPSRRQRANGAVGVDLGVKHLAALSTGEVIDNGRPGARQAARLTRLQRAHARTQPGSNRRERVRRQIAALQHGIALRRAGLLHQVSTRLATDFAVVALEDLNVAGMTRSARGTLEAPGRNVAAKSGLNRAILDAGLGMLRRQLDYKTSWAGSQVKMIDRFAPSSKACSRCGTVKSTLSLAERTFECEACHLVIDRDVNAAINIRAWAVQEERGAGVELARGRRESRNGRGAAVSGPPSGGAARQGRGSVKPAPQGVGMSSRATGWSSQPPSTEGESAERGASALAR

SEQ ID NO: 156 - protein, 505 aa, unidentified
  source 1..505: note = Paeniglutamicibacter sp.
  REGION 1..505: note = APG03759
MSVQAAMATTVIHRAYRLTLDPTPQQAQKLSQWAGAARAMYNHAIAAKQASHRSWLQEVAFATYEQELTEEQARKSIKVPIPTAYGFNAWLTETRNTHHDAAEKGLLLPGRDGREHEPWLHAVNRSALMGAMRHADDAWTNWIDSLTGTRAGRKIGYPRFKKRGVARDSFTITHDRKSPGIRLATTRRLRIPTFGEIRIHDHAKRLHRKLHTGTVEVTSVTVSRHGPRWYASLTVEETIPTPRLSKRKRAAGIIGVDLGVKITAALSNGDLIPNPRVKASHAKKLARLQKALAKSQKGSRNRAQLVQKIGCLTHLEARQREGHAHNLANRLVHTWAIIGIEDLNVAGMTRSSRGTIEKPGKNVRAKAGLNRSILDVAPAQIRHLLDYKTAWSGTQLVVIDRWAPTSKKCSTCGAVKAKLTLAERTFECEACGLVLDRDINAARNIAALAAVAPSTEETQNARRAAPRKPVPSTVKQRAAMKREDPPGSSPPSNGRTFHTVLVQVS

SEQ ID NO: 157 - protein, 515 aa, Streptomyces sp.
  REGION 1..515: note = APG05123
MEREVLRAFKFALDPTPAQAEALARHAGAARWAFNYALAVKVSAHQRWRAEVAGLVAQGIEEAEARRRVKVPVPSKPQIQKRLNEVKGDSRIDGRLPEGTFGPERPCPWWYEVNTYAFQSAFIDADRAWKNWLDSLRGVRAGRKVGYPRFKKKGRSRDSFRLHHDVKRPGIRLATYRRLRLPTIGEVRLHDSGKRLGRLVDRSLAVVQSVTVSRAGHRWYASVLCKVTMTVPDQPSRRQRERGTIGVDLGVKTLAALSQPLDPTDPDSDLIANPRHLARAQQRLLKAQRALSRTEKGSRRRDRARRKVARLHHEVALRRESALHAVTKRLATAFAVVAVEDLHVAGMTASARGTLEKPGRRVRQKAGLNRAVLDAAPGEFRRQLTYKTSWYGSKLAVCDRWFPSSKTCSACGWQNPHLTLTDRTFHCPDCGLTIDRDLNAARNIARHATVADAPPVAPGRGETQNARRAPVRPDDRKAARHGAMKREDTRPLGQVPPQRSNPLASPPTQKQATLF

SEQ ID NO: 158 - protein, 553 aa, Micrococcus sp.
  REGION 1..553: note = APG03524
MTTTTGTDLAPRLRAFKHRLDPNPAQATLLAQYAGAARVAYNMLIAHNRAALAAGAARRTELAESGLAGPELAARMKAERAADPTLRVASYQSYSTAHLTPLIRRHREAAAAIAAGADPAEAWTDERYAEPWMHTVPRRVLVSGLQNAAKATENWMASASGTRAGARVGLPRFKKKGRSRDSFTIPAPEVIGAAGTPYKRGEPRRGVITDHRHLRLASLGTIRTYDKTSRLVRACRRGAQIRSMTISQAGGRWYASILVADPTPIRTGPSRRQRANGAVGVDLGVKHLAALSTGEVIDNGRPGARQAARLARLQRAYARTQPGSNRRERVRRQIAALHHGIALRRAGLLHQVSTRLATDFAVVALEDLNVAGMTRSARGTLEAPGRNVAAKSGLNRAILDAGLGMLRRQLDYKTSWAGSQVKMIDRFAPSSKACSRCGTVKSTLSLAERTFECEACHLVIDRDVNAAINIRAWAVQEERGAGVELARGRRESRNGRGAAVSGPPSGGAAGQGRGSVKPAPQGVGMSSRATGWSSQPPSTEGESAERGASALAR

SEQ ID NO: 159 - protein, 782 aa, Bacillus sp.
  REGION 1..782: note = APG07446
MKLKRGLLVLCTSTALIYPSIVNAKNNDVPFYDGKNDTFLSSKYLQLPGKYFRPGSGYASKESLYRADIHFPAVYNGSFNWGNPKENLVQAEDSSEPYIRIANEGYLNGSVPAGDRMVTEVERINKYVISDKYWGNPDFVLDNIDNHSINTYETYKELGQFYWIRDIAYLSGGYAGAGAVEGINKYSLWYVRTNKPELKDFKASSSTKDVPVKFTFNGFEYVSKNKGYNDRDPNGTTVNPYQAAAGERNRVKWMLDITKDGETVHHQENYLRSTPQKDNERSNEGDAGKFVKDDVKWQPQMCGQYTAKIKVLDAVQRESNEKNVDFTIDGNCGNEVTPNPDPGDEDDFKYIIDFSADRIEGETAREGKNIKTRVDVSRDNFKPERDQYRVKVNNNINKSQQEVNSSESERDSAQSSLSYCRRNPIHEVDAEGKDHYYDRDCSWEENKLDSAASKLDNARQKFEKEKNKLKKLDVLEEKYTNPETVVVLKHNGQQVALQKVRLTEGEKKTLNLDWQHKGKGTIQAEINPAGNRIDIEETTYKNNPIKTAIYEPSKEKAMCGVTSVKGVVETVSERVSKEDITGEMYYETLTGSIDNLAPSKLHSGYGFSYEVNGKYKNDWNANYPGVFTAAKAQYPFADEGLKSTQDLEKKELKDNTAKFLPKNMYLSEATGHVFDSKRPTKSLYWDGQEKIIDGGQKWYSPLKTKDGVYTFNVETAPAGINEMSLCLTEQVEIKGVAYDDFIKRRVFPDDPFPGGSGVGWNWVGKEELLHKLTDWYYMKTGK

SEQ ID NO: 160 - protein, 759 aa, Bacillus sp.
  REGION 1..759: note = APG07641
MKNNDVPFYDGKNDTFLSSKYLQLPGKYFRPGSGYASKESLYRADIHFPAVYNGSFNWGNPKENLVQAEDSSEPYIRIANEGYLNGSVPAGDRMVTEVERINKYVISDKYWGNPDFVLDNIDNHSINTYETYKELGQFYWIRDIAYLSGGYAGAGAVEGINKYSLWYVRTNKPELKDFKASSSTKDVPVKFTFNGFEYVSKNKGYNDRDPNGTTVNPYQAAAGERNRVKWMLDITKDGETVHHQENYLRSTPQKDNERSNEGDAGKFVKDDVKWQPQMCGQYTAKIKVLDAVQRESNEKNVDFTIDGNCGNEVTPNPDPGDEDDFKYIIDFSADRIEGETAREGKNIKTRVDVSRDNFKPERDQYRVKVNNNINKSQQEVNSSESERDSAQSSLSYCRRNPIHEVDAEGKDHYYDRDCSWEENKLDSAASKLDNARQKFEKEKNKLKKLDVLEEKYTNPETVVVLKHNGQQVALQKVRLTEGEKKTLNLDWQHKGKGTIQAEINPAGNRIDIEETTYKNNPIKTAIYEPSKEKAMCGVTSVKGVVETVSERVSKEDITGEMYYETLTGSIDNLAPSKLHSGYGFSYEVNGKYKNDWNANYPGVFTAAKAQYPFADEGLKSTQDLEKKELKDNTAKFLPKNMYLSEATGHVFDSKRPTKSLYWDGQEKIIDGGQKWYSPLKTKDGVYTFNVETAPAGINEMSLCLTEQVEIKGVAYDDFIKRRVFPDDPFPGGSGVGWNWVGKEELLHKLTDWYYMKTGK

SEQ ID NO: 161 - protein, 789 aa, Bacillus sp.
  REGION 1..789: note = APG01250
MKFKKGIFVLFTSVLLSAPNSADAKNNDVPFYNGNEDTFVKSAQLQMPGKYFRPGSYSPQGTDLMYKGDIHYPAVYNGSFNWGNPKENLVQGNDSSEPYIRISNEGYFNSSVPVGDRMVTEIERVTEPIISNKYWGNPEFVLGNIKEHIIRNDKTNEMYGQFYWIRDIAYLSGGYAGAGAVDNVNNYNLWYVRTSKPELKEFKASSGKKDDPVKFIFNGFEYVSKNKGYNDRDPNGTTVNPYQSEAGERNRVKWMLDIIKNGETVHHQGNYLRSNPQKNNDKPNEGDAGYFSKEGIPFYPQECGRYTAKLKLIDAVQRESTEKVVDFVVDGSCGTQVPPTTDPVDGEFNYKIDYSADRIEGETARKDKEIKTRVDVSRASFKEEHDQYRAKLDEEFKKYQKEVDAYISERDSAQDSLNYCRRNPIREEDEKGGVHYRDRDCSWEENNLDNVVSKLEKAKQNREKLSKKLGDFDKLNAQYHNPEVTVILKHNGKKVESKTVRLKEGEKKTVFFNWEHKGKGTIQAEINPADEDGSRLDIKETTYKNNPIKTAIYEPSQEKAMCGATSVKGVVETVSNRVSVEDTVGEMYHETLTGSIDKLVPSKLHSGYGFTYELDGKYTNNWDQNYQGVFTVATAKYPFADEGLKLNQDLEKKEIKDNTSKFIPKNMYLSEKTGYVFDSKRPIKSLYWDGQEKIIDGGHKWYAPMKTKDGKYSFKVETKPTGINEMSLCMTEEVEIKGVAYDDFIKRRVFPDDPFPGGSGVGWNWVGKEELLHKLTDWYYMKNGNKNKI

SEQ ID NO: 162 - protein, 766 aa, Bacillus sp.
  REGION 1..766: note = APG02261
MKNNDVPFYNGNEDTFVKSAQLQMPGKYFRPGSYSPQGTDLMYKGDIHYPAVYNGSFNWGNPKENLVQGNDSSEPYIRISNEGYFNSSVPVGDRMVTEIERVTEPIISNKYWGNPEFVLGNIKEHIIRNDKTNEMYGQFYWIRDIAYLSGGYAGAGAVDNVNNYNLWYVRTSKPELKEFKASSGKKDDPVKFIFNGFEYVSKNKGYNDRDPNGTTVNPYQSEAGERNRVKWMLDIIKNGETVHHQGNYLRSNPQKNNDKPNEGDAGYFSKEGIPFYPQECGRYTAKLKLIDAVQRESTEKVVDFVVDGSCGTQVPPTTDPVDGEFNYKIDYSADRIEGETARKDKEIKTRVDVSRASFKEEHDQYRAKLDEEFKKYQKEVDAYISERDSAQDSLNYCRRNPIREEDEKGGVHYRDRDCSWEENNLDNVVSKLEKAKQNREKLSKKLGDFDKLNAQYHNPEVTVILKHNGKKVESKTVRLKEGEKKTVFFNWEHKGKGTIQAEINPADEDGSRLDIKETTYKNNPIKTAIYEPSQEKAMCGATSVKGVVETVSNRVSVEDTVGEMYHETLTGSIDKLVPSKLHSGYGFTYELDGKYTNNWDQNYQGVFTVATAKYPFADEGLKLNQDLEKKEIKDNTSKFIPKNMYLSEKTGYVFDSKRPIKSLYWDGQEKIIDGGHKWYAPMKTKDGKYSFKVETKPTGINEMSLCMTEEVEIKGVAYDDFIKRRVFPDDPFPGGSGVGWNWVGKEELLHKLTDWYYMKNGNKNKI

SEQ ID NO: 163 - RNA, 25 nt, synthetic construct
  source 1..25: mol_type = other RNA
  misc_feature 1..25: note = LPG10134 crRNA repeat
gttgccgctggccttcgatttctga

SEQ ID NO: 164 - RNA, 14 nt, synthetic construct
  source 1..14: mol_type = other RNA
  misc_feature 1..14: note = LPG10136 crRNA repeat
gtcatagttccact

SEQ ID NO: 165 - RNA, 25 nt, synthetic construct
  source 1..25: mol_type = other RNA
  misc_feature 1..25: note = LPG10138 crRNA repeat
gtcatagtcccatcatatccattgc

SEQ ID NO: 166 - RNA, 24 nt, synthetic construct
  source 1..24: mol_type = other RNA
  misc_feature 1..24: note = LPG10139 crRNA repeat
gtcatagtcccatcatatccattg

SEQ ID NO: 167 - RNA, 25 nt, synthetic construct
  source 1..25: mol_type = other RNA
  misc_feature 1..25: note = LPG10141 crRNA repeat
gttgccgctggaccgcgatctctga

SEQ ID NO: 168 - RNA, 24 nt, synthetic construct
  source 1..24: mol_type = other RNA
  misc_feature 1..24: note = LPG10145 crRNA repeat
gtttttgtactctcaaggaatcag

SEQ ID NO: 169 - RNA, 20 nt, synthetic construct
  source 1..20: mol_type = other RNA
  misc_feature 1..20: note = LPG10146 crRNA repeat
gctgagaattagcatccttc

SEQ ID NO: 170 - RNA, 16 nt, synthetic construct
  source 1..16: mol_type = other RNA
  misc_feature 1..16: note = LPG10147 crRNA repeat
gttgtgaattcctttc

SEQ ID NO: 171 - RNA, 16 nt, synthetic construct
  source 1..16: mol_type = other RNA
  misc_feature 1..16: note = LPG10150 crRNA repeat
gttgtgaattgctttc

SEQ ID NO: 172 - RNA, 16 nt, synthetic construct
  source 1..16: mol_type = other RNA
  misc_feature 1..16: note = LPG10155 crRNA repeat
gttgtgaattgctttc

SEQ ID NO: 173 - RNA, 15 nt, synthetic construct
  source 1..15: mol_type = other RNA
  misc_feature 1..15: note = LPG10159 crRNA repeat
gttgtgaattgcttt

SEQ ID NO: 174 - RNA, 15 nt, synthetic construct
  source 1..15: mol_type = other RNA
  misc_feature 1..15: note = LPG10160 crRNA repeat
gttgtgatttgcttt

SEQ ID NO: 175 - RNA, 80 nt, synthetic construct
  source 1..80: mol_type = other RNA
  misc_feature 1..80: note = LPG10134 tracrRNA
tgtcagaaatcgaaggctggctgttaacaagcagctagactgcaccaaataagggcggggctacggccccgtcttttttt

SEQ ID NO: 176 - RNA, 89 nt, synthetic construct
  source 1..89: mol_type = other RNA
  misc_feature 1..89: note = LPG10136 tracrRNA
acagcaatggctttgatgtttctatgataagggtttcgacccgtggcgttggggatcgcctgcccatttcgatgggcgtctccccattt

SEQ ID NO: 177 - RNA, 102 nt, synthetic construct
  source 1..102: mol_type = other RNA
  misc_feature 1..102: note = LPG10138 tracrRNA
acagcaatggatatgatgtttctatgataagggctctctaagagagacctgtggcgttggggatcgcctgcccgtttcgacgggtgtctccccatttcattt

SEQ ID NO: 178 - RNA, 102 nt, synthetic construct; identical to SEQ ID NO: 177
  source 1..102: mol_type = other RNA
  misc_feature 1..102: note = LPG10139 tracrRNA

SEQ ID NO: 179 - RNA, 77 nt, synthetic construct
  source 1..77: mol_type = other RNA
  misc_feature 1..77: note = LPG10141 tracrRNA
tcagagatcgcggtctggctgttaacaagcagtcaagtctgcaccagataagggcgacgctccggcgtcgccttttt

SEQ ID NO: 180 - RNA, 85 nt, synthetic construct
  source 1..85: mol_type = other RNA
  misc_feature 1..85: note = LPG10145 tracrRNA
taccattactgattccttgagaatctacaaaaataaggctttatgccgaaattcccactcttaacggagtgggttttttattttt

SEQ ID NO: 181 - RNA, 97 nt, synthetic construct
  source 1..97: mol_type = other RNA
  misc_feature 1..97: note = LPG10146 tracrRNA
gaagaagctaattctcagtaagtacagcaatttatagctgtatctgaatgctaagcggttagccgcaggggagagcttcggctctccccgttctttt

SEQ ID NO: 182 - RNA, 76 nt, synthetic construct
  source 1..76: mol_type = other RNA
  misc_feature 1..76: note = LPG10147 tracrRNA
tttgtaacgaaaggaattcacaataaggattattccgttgtgaaaacatttaaggtggggtaactcgccttttttt

SEQ ID NO: 183 - RNA, 72 nt, synthetic construct
  source 1..72: mol_type = other RNA
  misc_feature 1..72: note = LPG10150 tracrRNA
gaaagcaattcacaataaggattattccgttgtgaaaacatttagcgcctcgcctatctgcggggtattttt

SEQ ID NO: 184 - RNA, 72 nt, synthetic construct; identical to SEQ ID NO: 183
  source 1..72: mol_type = other RNA
  misc_feature 1..72: note = LPG10155 tracrRNA

SEQ ID NO: 185 - RNA, 75 nt, synthetic construct
  source 1..75: mol_type = other RNA
  misc_feature 1..75: note = LPG10159 tracrRNA
gaaagcaattcacaataaggattattccgttgtgaaaacatctagcgcctcgtctatctacggggcatttttttt

SEQ ID NO: 186 - RNA, 88 nt, synthetic construct
  source 1..88: mol_type = other RNA
  misc_feature 1..88: note = LPG10160 tracrRNA
taataattttgaaaagcaattcacaataaggattattccgttgtgaaaacatttaagccccctcgtcttacaatacggggattttttt

SEQ ID NO: 187 - RNA, 23 nt, synthetic construct
  source 1..23: mol_type = other RNA
  misc_feature 1..23: note = LPG10165 crRNA repeat
gtcatagttccattaaagccatt

SEQ ID NO: 188 - RNA, 20 nt, synthetic construct
  source 1..20: mol_type = other RNA
  misc_feature 1..20: note = LPG10166 crRNA repeat
gttgcggttggccctcaatc

SEQ ID NO: 189 - RNA, 23 nt, synthetic construct
  source 1..23: mol_type = other RNA
  misc_feature 1..23: note = LPG10167 crRNA repeat
gtcatagttccattaaagccatt

SEQ ID NO: 190 - RNA, 23 nt, synthetic construct
  source 1..23: mol_type = other RNA
  misc_feature 1..23: note = LPG10168 crRNA repeat
gtcatagttccattaaagccatt

SEQ ID NO: 191 - RNA, 17 nt, synthetic construct
  source 1..17: mol_type = other RNA
  misc_feature 1..17: note = LPG10169 crRNA repeat
gttttagtactctgtaa

SEQ ID NO: 192 - RNA, 20 nt, synthetic construct
  source 1..20: mol_type = other RNA
  misc_feature 1..20: note = LPG10171 crRNA repeat
gctatagttccataagaaac

SEQ ID NO: 193 - RNA, 22 nt, synthetic construct
  source 1..22: mol_type = other RNA
  misc_feature 1..22: note = LPG10186 crRNA repeat
gttttagtgtcatgttgaatag

SEQ ID NO: 194 - RNA, 13 nt, synthetic construct
  source 1..13: mol_type = other RNA
  misc_feature 1..13: note = LPG10190 crRNA repeat
gccataattcctc

SEQ ID NO: 195 - RNA, 18 nt, synthetic construct
  source 1..18: mol_type = other RNA
  misc_feature 1..18: note = LPG10191 crRNA repeat
gtttcggcactctctcag

SEQ ID NO: 196 - RNA, 13 nt, synthetic construct
  source 1..13: mol_type = other RNA
  misc_feature 1..13: note = LPG10194 crRNA repeat
gttgcggctggac

SEQ ID NO: 197 - RNA, 16 nt, synthetic construct
  source 1..16: mol_type = other RNA
  misc_feature 1..16: note = LPG10195 crRNA repeat
gtttcagctggatgtc

SEQ ID NO: 198 - RNA, 15 nt, synthetic construct
  source 1..15: mol_type = other RNA
  misc_feature 1..15: note = LPG10196 crRNA repeat
gttggaaatctatcc

SEQ ID NO: 199 - RNA, 16 nt, synthetic construct
  source 1..16: mol_type = other RNA
  misc_feature 1..16: note = LPG10197 crRNA repeat
gttatagatgtacttc

SEQ ID NO: 200 - RNA, 16 nt, synthetic construct
  source 1..16: mol_type = other RNA
  misc_feature 1..16: note = LPG10198 crRNA repeat
gctatagttccttacc

SEQ ID NO: 201 - RNA, 17 nt, synthetic construct
  source 1..17: mol_type = other RNA
  misc_feature 1..17: note = LPG10200 crRNA repeat
gttgcggctggaccacg

SEQ ID NO: 202 - RNA, 14 nt, synthetic construct
  source 1..14: mol_type = other RNA
  misc_feature 1..14: note = LPG10203 crRNA repeat
gccataattcctcc

SEQ ID NO: 203 - RNA, 14 nt, synthetic construct
  source 1..14: mol_type = other RNA
  misc_feature 1..14: note = LPG10204 crRNA repeat
gccataattcctcc

SEQ ID NO: 204 - RNA, 14 nt, synthetic construct
  source 1..14: mol_type = other RNA
  misc_feature 1..14: note = LPG10205 crRNA repeat
gccataattcctcc

SEQ ID NO: 205 - RNA, 14 nt, synthetic construct
  source 1..14: mol_type = other RNA
  misc_feature 1..14: note = LPG10205 crRNA repeat 2
gccataattcctcc

SEQ ID NO: 206 - RNA, 19 nt, synthetic construct
  source 1..19: mol_type = other RNA
  misc_feature 1..19: note = LPG10207 crRNA repeat
gtcatagttccattaaagc

SEQ ID NO: 207 - RNA, 14 nt, synthetic construct
  source 1..14: mol_type = other RNA
  misc_feature 1..14: note = LPG10208 crRNA repeat
gccataattcctcc

SEQ ID NO: 208 - RNA, 112 nt, synthetic construct
  source 1..112: mol_type = other RNA
  misc_feature 1..112: note = LPG10165 tracrRNA
agatttatagagttattatggtaaggcattatgccgtggcgttggggatcgcctaactccgatttttatcggatttccctaaaaatgactaactttgtttagtcattttttt

SEQ ID NO: 209 - RNA, 83 nt, synthetic construct
  source 1..83: mol_type = other RNA
  misc_feature 1..83: note = LPG10166 tracrRNA
gagggcctcccgttaacaagcttatgcacaaaatggggcaccctgcggggtgccccttccatttgtgagcgcgactggttttt

SEQ ID NO: 210 - RNA, 87 nt, synthetic construct
  source 1..87: mol_type = other RNA
  misc_feature 1..87: note = LPG10167 tracrRNA
aatggctttgatgtttctatgataagggtttcggcccgtggcgttggggatcgcctgcccatttcaatgggcttctccccatttatt

SEQ ID NO: 211 - RNA, 87 nt, synthetic construct; identical to SEQ ID NO: 210
  source 1..87: mol_type = other RNA
  misc_feature 1..87: note = LPG10168 tracrRNA

SEQ ID NO: 212 - RNA, 68 nt, synthetic construct
  source 1..68: mol_type = other RNA
  misc_feature 1..68: note = LPG10169 tracrRNA
ttacagaatctactaaaacaaggcaaaatgccgtgtttatctcgtcaacttgttggcgagattttttt

SEQ ID NO: 213 - RNA, 115 nt, synthetic construct
  source 1..115: mol_type = other RNA
  misc_feature 1..115: note = LPG10171 tracrRNA
gtttcttacgttactatagtaagggcaatgacccgtggcgtttggggatcgcctcatccattacggatattctccccatgtgaaaagcacctaagcataaggctaaggtgctttt

SEQ ID NO: 214 - RNA, 70 nt, synthetic construct
  source 1..70: mol_type = other RNA
  misc_feature 1..70: note = LPG10186 tracrRNA
ctattcaacatggcaagttaaaataagctttatgcgtattcaaacttttgttaaggcgacatcgcctttt

SEQ ID NO: 215 - RNA, 57 nt, synthetic construct
  source 1..57: mol_type = other RNA
  misc_feature 1..57: note = LPG10190 tracrRNA
gagttattatggtaaggcattatgccgtggcgttggggatcgcctaactccgatttt

SEQ ID NO: 216 - RNA, 63 nt, synthetic construct
  source 1..63: mol_type = other RNA
  misc_feature 1..63: note = LPG10191 tracrRNA
ctgagagaacctgccgaaacaagagttcatctcgaaatcagtcccacttcgtgtggggctttt

SEQ ID NO: 217 - RNA, 77 nt, synthetic construct
  source 1..77: mol_type = other RNA
  misc_feature 1..77: note = LPG10194 tracrRNA
gtccttccgttaacacgctcgggaacgcaagttccttgcagcacaagatgtgcggcgggcctcggcccgccgcgttt

SEQ ID NO: 218 - RNA, 79 nt, synthetic construct
  source 1..79: mol_type = other RNA
  misc_feature 1..79: note = LPG10195 tracrRNA
gacatccagaagttgaaatcaagcaagacttaaagtcaagcttctacctttgatccacgctttgtggacagtacatatt

SEQ ID NO: 219 - RNA, 99 nt, synthetic construct
  source 1..99: mol_type = other RNA
  misc_feature 1..99: note = LPG10196 tracrRNA
gatagattcccaataaggcgcagcgggatttagctgcactggttgctcacgacatcaacatgtcgtaggggaggctccttcacggggcctccccgtttt

SEQ ID NO: 220 - RNA, 75 nt, synthetic construct
  source 1..75: mol_type = other RNA
  misc_feature 1..75: note = LPG10197 tracrRNA
gaagtacagagttataatcaaacaagtgcttcggcacaagtttctacttatgagtcagttatctgaccattacat

SEQ ID NO: 221 - RNA, 59 nt, synthetic construct
  source 1..59: mol_type = other RNA
  misc_feature 1..59: note = LPG10198 tracrRNA
ggtaagttgctgtagtaagggcaacagacccgaggcgttggggatcgcctagcccgttt

SEQ ID NO: 222 - RNA, 64 nt, synthetic construct
  source 1..64: mol_type = other RNA
  misc_feature 1..64: note = LPG10200 tracrRNA
cgtggtctggccgttaacaagccaagacggcaccagataaggcgctcgctccggcgggcgcttt

SEQ ID NO: 223 - RNA, 105 nt, synthetic construct
  source 1..105: mol_type = other RNA
  misc_feature 1..105: note = LPG10203 tracrRNA
ggagttattatggtaaggcattatgccgcggcgttgggaatcgcctatattcgattaatatcgaatcttcccacaaaatgactaacttagtttagtcattttttt

SEQ ID NO: 224 - RNA, 104 nt, synthetic construct
  source 1..104: mol_type = other RNA
  misc_feature 1..104: note = LPG10204 tracrRNA
ggagttattatggtaaggcattatgccgtggcgttggggatcgcctacatccgattagatcggattctccctaaaaatgactaactttgtttagtcattttttt

SEQ ID NO: 225 - RNA, 104 nt, synthetic construct
  source 1..104: mol_type = other RNA
  misc_feature 1..104: note = LPG10205 tracrRNA
ggagttattatggtaaggcattatgccgtggcgttggggatcgcctacatccgattatatcggattctccctaaaaatgactaactttgtttagtcattttttt

SEQ ID NO: 226 - RNA, 68 nt, synthetic construct
  source 1..68: mol_type = other RNA
  misc_feature 1..68: note = LPG10205 tracrRNA2
ggagttattatggtaaggcattatgccgtggcgttggggatcgcctacatccgattatatcggattct

SEQ ID NO: 227 - RNA, 84 nt, synthetic construct
  source 1..84: mol_type = other RNA
  misc_feature 1..84: note = LPG10207 tracrRNA
gctttgatgtttctatgataagggtttcggcccgtggcgtcggggatcgcctgcccattttgatgggcttctccccatctattt

SEQ ID NO: 228 - RNA, 104 nt, synthetic construct; identical to SEQ ID NO: 224
  source 1..104: mol_type = other RNA
  misc_feature 1..104: note = LPG10208 tracrRNA

SEQ ID NO: 229 - protein, 235 aa, synthetic construct
  REGION 1..235: note = APG05241
MNSKTGPSVGDATLRRRIKPWEFVAFFNPQELRKETCLLYEIKWGNQNIWRHSNQNTSQHAEINFMEKFTAERHFNSSVRCSITWFLSWSPCWECSKAIRKFLDHYPNVTLAIFISRLYWHMDQQHRQGLKELVHSGVTIQIMSYSEYHYCWRNFVDYPQGEEDYWPKYPYLWIMLYVLELHCIILGLPPCLKISGSHSNQLALFSLDLQDCHYQKIPYNVLVATGLVQPFVTWR

SEQ ID NO: 230 - protein, 262 aa, synthetic construct
  REGION 1..262: note = APG07280
MHHSARLPPNCIVSRYANAPWTVLPLPLPPTEAPATGDDTLRRRIEPWEFEAFFNPQELRREACLLYQITWSSHKVWRETAKNTVDSHVEVNFIQNLTAGRYCRPSTRCSILWFLSWSPCSSCSKAIRLFLSQHPGVSLVIYVARLFQHMDPQNRQGLRELIHSGVTIQVMRPQEYDYCWKNFVNYPPGQEEHWPRYPVQCMTLYNLELYCIIHNLPPCVRISKQRQSQLAFFSLGLENVHYQRIPPPLLLLTGLVFVFPWK

SEQ ID NO: 231 - protein, 211 aa, synthetic construct
  REGION 1..211: note = APG09260
MEDFHCVCVYCPLQVSVMSDYQAASSSPDCPQCPQHILTGAEAAVSYSQFCETFGFHMGPSGARALLLFYELWGPSGTLVQRGQASNLLEVCEEVLYSNYMPCQECSQTLISFLLRYPWVRLDLLFSQLYHTAPSQTHSLDNQTGLRSLAVLTLSPNSGAAWGHLLRCFVRDVPPSALQLPLLPERVEADRVNAIHISATTGIGPAFWTSH

SEQ ID NO: 232 - protein, 234 aa, synthetic construct
  REGION 1..234: note = APG08360
MDPQRLRQWPGPGPASRGGYGQRPRIRNPEEWFHELSPRTFSFHFRNLRFASGRNRSYICCQVEGKNCFFQGIFQNQKKRHAEIRFIDKINSLNLDQNQCYRIICYVTWSPCHNCAKELVDFISNRHHLSLQLFASRLYFHWVRCYQRGLQRLQANRVSVAVMKGPEFKDCWEKFVDHQGESFPSWEKLEQYSESISRRLSRILRFANQNNLEDSFRDLRLGSPSPSSSRSDSR

SEQ ID NO: 233 - protein, 230 aa, synthetic construct
  REGION 1..230: note = APG09980
MAAGPAPEARSLMDEQTFLDNFNNLKYPRKTYLCYEVELLVGENHIPLDDYKGFVHNEGFDMGLERCHAELIFLERMASWNLDTELRYRITVFISWSPCPECADELVKFLRENRHVNLRIFAARIYDWYQGYEAGLRALKAAGAEVAMMTLHEFEYCWNNFVDHQQDEDTPFPPWDNLVARSEELSQRLEGILQPSVLVFCWPSQVSVTAAHSDIMSQASRAWEKRRDPP

SEQ ID NO: 234 - protein, 395 aa, synthetic construct
  REGION 1..395: note = APG07386
MNPQIRNPMEGMDRHAFNYNFENEPILYGRSYTWLCYEVKIRKDPSKLPWDTGVFRGQVRPKLQSNRRYELSNWECRKHVYFQPQYHAEMCFLSWFCGNQLPAHKRFQITWFVSWTPCPDCVAKVTEFLAEHPNVTLTISVARLYYYRGKDWRRALCRLHQAGARVKIMDYEEFAYCWENFVYNEGQSFMPWDKFDDNYAFLHHKLKEILRNPMEATYPHIFYFHFKNLRKAYGRNETWLCFTMEIIKQHSTVFWETGVFRNQVYPESLCHAERCFLSWFCEDILSPNTDYRVTWYTSWSPCLDCAGEVAEFLARHSNVKLAIFAARLYYFWDPHYQQGLRSLSEKGASVEIMGYKDFKYCWENFVYNGDEPFKPWKGLKYNFLFLDSKLQEILQ

SEQ ID NO: 235 - protein, 267 aa, synthetic construct
  REGION 1..267: note = APG09688
MGTPKDTKSRHLAGRCHELHNSRGRSPESDTMASEKGPSNKDYTLRRRIEPWEFEVFFDPQELRKEACLLYEIKWGASSKTWRSSGKNTTNHVEVNFLEKLTSEGRLGPSTCCSITWFLSWSPCWECSTAIREFLSQHPGVTLVIFVARLFQHMDRRNRQGLKDLVTSGVTVQVMSVSEYCYCWENFVNYPPGKAAQWPRYPPRWMLMYALELYCIILGLPPCLKISRRHQKQLTFFSLTPQYCHYKMIPPYILLATGLLQPSVPWR

SEQ ID NO: 236 - protein, 201 aa, synthetic construct
  REGION 1..201: note = APG05840
MEASPASRPRPLMDPHMFTGNFTNNPRVFGLHQTYLCYEVKRQGPDGTRDLMNEQRDFLCNQAKNHFSGSEDHHAERCFLDRIPSWQLDPAQTYRVTCFISWSPCFSCAQEVAEFLHENPHVNLRIFAARIYDYLPRYEEGLQMLQNAGAQVSIMTSEEFGHCWDTFVDRQGHPFQPWEGLDEHSQALSGRLQAILQNQGN

SEQ ID NO: 237 - protein, 373 aa, synthetic construct
  REGION 1..373: note = APG02316
MIENPALKISKRDRIKISNLKDLKNALKNENYNIKANDKEKFKDEVKKVFNINDDIFERLDKCLNRDITYKVDNVEDFIDYIKKIMIFEDKHEIICEKLKRIKKLYINREEYEREKSTRDNVEHIIEVIEKTKENVSRKISLEELERLEILEEELEDKYLFAKDIEFLKKMILGNCKNVIESYNEKTKIKTLKMKIPKEINYSYIKAKEGSVEYHQYLNNNINRMNRLIKSIDKYIEHYKDDIFNINQSLALQDSINIALATFDNKEFKAISGKNDIEDYCKVIPIEKSRFKSRKVNKLGELGIGYNRINDSEKKILEEIHEKIKQKILKDRGNLTLYTKWEPCPSCYFVISQFCEKYPNIKVEVKYNKKYGE

SEQ ID NO: 238 - protein, 192 aa, synthetic construct
  REGION 1..192: note = APG00868
MEPWRPSPRNPMDRIDPNTFRFHFPNLLYASGRKLCYLCFQVETGDYFSCDDSDRGVFRNKVHPWARCHAEQCFLSWFRDQYPCRDEYYNVTWFLSWSPCPTCAEEVVEFLEEYRNLTLSIFTSRLYYFYHPNYQQGLRKLWDAGVQLDIMSCDDFEHCWDNFVDHKGMRFQRRNLLKDYDFLAAELQEILR

SEQ ID NO: 239 - protein, 152 aa, synthetic construct
  REGION 1..152: note = APG30125
MINLVQTPYDLNSGYPIVRRTLEDKKKLVKHEGFGPESCCATIEYTLRGNSRYAFGNSQMQVEMPPNIYAHNWVKLHGEMTALVAAIRRIERVDSTSAVLPITSAYIELRPCEASCLPALHNMLPDNITVYFSFLHPTQVDQWKQSARALCA

SEQ ID NO: 240 - protein, 152 aa, synthetic construct
  REGION 1..152: note = APG30126
MPVLIKVPYDINSANGVVQACLRKKREVVQSKDNGGITGIGAGSCCSFVVYMKHGGDVDNVFGNSRIRIPFKVNGIEIANACAHGELTALWNAIADEPSIPTILAMYIEMSPCTKCQSALDNLLQPGQEIYYSFDHPGEVKAWQAAAKHLCA

SEQ ID NO: 241 - protein, 148 aa, synthetic construct
  REGION 1..148: note = APG30127
MIKTEYSLSSGYPIVRRTLEDKKNLVKQPGFGPESCCAVVQYRLRGNIRYAFGNSRMQISMPPGIYTHNWVRLHGEMAALVAAINRIERYSTDDVIPITAAYIELRPCEANCMQALRNILPEDACVYYSFDHPTQVDEWKLRANELCS

SEQ ID NO: 242 - protein, 147 aa, synthetic construct
  REGION 1..147: note = APG30128
MIKTEYTLRSGYPIVRRTLENKKNLVKQPGFGPESCCAVVEYRLRGNIRYAFGNSRMQVSVPPGIYTNNWVRLHGEMAALVAAIERIERFSSDDVIPITAAYIELRPCEANCMQALHNILPENANVYYSFDHPTQVEEWKLRAHELC

SEQ ID NO: 243 - protein, 147 aa, synthetic construct
  REGION 1..147: note = APG30129
MIKTEYALNSGYPIVRRTLEDKKKLVKQPGFGPESCCAVVEYRLRGNIRYAFGNSQMHVSMPPGIYTHNWVKLHGEMAALVAAINRIERFSTDDVIPITGAYIELRPCEANCLQALHNILPEDANVYYSFDHPTQLDEWKLRAHELC

SEQ ID NO: 244 - protein, 147 aa, synthetic construct
  REGION 1..147: note = APG30130
MIQLVQAEYSIKSGYPIVRRTLEDKKKLIEKPGFGPESCCATIEYQLRGSTRYAFGNSQMKMEMPPDIYTHNWVKLHAEMAALVAAIRRIERFDADKEQVPITNVYIELRPCEANCMQALQNILPDGTTVYYSFLHPTEVEEWKRSA

SEQ ID NO: 245 - protein, 182 aa, synthetic construct
  REGION 1..182: note = APG09980.1
MDEQTFLDNFNNLKYPRKTYLCYEVELLVGENHIPLDDYKGFVHNEGFDMGLERCHAELIFLERMASWNLDTELRYRITVFISWSPCPECADELVKFLRENRHVNLRIFAARIYDWYQGYEAGLRALKAAGAEVAMMTLHEFEYCWNNFVDHQQDEDTPFPPWDNLVARSEELSQRLEGILQ

SEQ ID NO: 246 - protein, 185 aa, synthetic construct
  REGION 1..185: note = APG05840.1
MDPHMFTGNFTNNPRVFGLHQTYLCYEVKRQGPDGTRDLMNEQRDFLCNQAKNHFSGSEDHHAERCFLDRIPSWQLDPAQTYRVTCFISWSPCFSCAQEVAEFLHENPHVNLRIFAARIYDYLPRYEEGLQMLQNAGAQVSIMTSEEFGHCWDTFVDRQGHPFQPWEGLDEHSQALSGRLQAILQ

SEQ ID NO: 247 - protein, 178 aa, synthetic construct
  REGION 1..178: note = APG00868.1
MDPNTFRFHFPNLLYASGRKLCYLCFQVETGDYFSCDDSDRGVFRNKVHPWARCHAEQCFLSWFRDQYPCRDEYYNVTWFLSWSPCPTCAEEVVEFLEEYRNLTLSIFTSRLYYFYHPNYQQGLRKLWDAGVQLDIMSCDDFEHCWDNFVDHKGMRFQRRNLLKDYDFLAAELQEILR

SEQ ID NO: 248 - protein, 169 aa, synthetic construct
  REGION 1..169: note = APG09982
MSDLELNHEYWMRHALQLAKRARDEGEVPVGAVLVLNNQVIGEGWNRAIGLHDPTAHAEIMALRQGGLVLQNYRLYDTTLYSTFEPCVMCSGAMVHSRIGTLVFGVRNEKTGAAGSLMDVLRHPGMNHQVQIIDGVLAPECSGLLCRFFRMPRRVFNQQKAESTSSPGD

SEQ ID NO: 249 - protein, 164 aa, synthetic construct
  REGION 1..164: note = APG03724
MSNPELTHEHWMRYALTLAKRAREEGEVPVGAVLVLNNQVIGEGWNRAIGLHDPTAHAEIMALRQGGLVLQNYRLYDTTLYSTFEPCVMCAGAMVHSRIGQLVFGVRNAKTGAAGSLMDVLHHPGMNHRIEFTEGVLRDECAAMLCRFFRQPRRVFNALKTGNA

SEQ ID NO: 250 - protein, 169 aa, synthetic construct
  REGION 1..169: note = APG09949
MSIPELNHDVWMRHALTLAKRAREEGEVPVGAVLVLNGQVIGEGWNRAIGLHDPTAHAEIMALRQGGLVLQNYRLYDTTLYSTFEPCVMCAGAMVHSRIGQLVFGVRNAKTGAAGSLIDVLHHPGMNHRVAITEGVLREECAAMLCRFFRQPRRVFNALKKPAGDPTAF

SEQ ID NO: 251 - protein, 172 aa, synthetic construct
  REGION 1..172: note = APG08196
MSNPELNHEYWMRYALTLAKRARDEGEVPVGAVLVLNDQVIGEGWNRAIGLHDPTAHAEIMALRQGGLVLQNYRLYDTTLYSTFEPCVMCAGAMVHSRIGRLVFGVRNAKTGAAGSLLDVLHHPGMNHHIEMEEGVLRDECAAMLCRFFRQPRRVFNALKKSPPDSPNLQAR

SEQ ID NO: 252 - protein, 169 aa, synthetic construct
  REGION 1..169: note = APG06333
MSNPELTHDHWMRHALTLAQRARNEGEVPVGAVLVLNGQVIGEGWNRAIGLHDPTAHAEIMALRQGGLVLQNYRLYDTVLYSTFEPCVMCAGAMVHSRIGQLVFGVRNAKTGAAGSLIDVLHHPGMNHRVEIIEGVLRDECAAMLCRFFRHPRRVFNALKKNAGTSPTQ

SEQ ID NO: 253 - protein, 166 aa, synthetic construct
  REGION 1..166: note = APG06489
MSDTELNHEYWMRHALMLAKRARDEGEVPVGAVLVLKNQVIGEGWNRAIGLHDPTAHAEIMALRQGGLVLQNYRLYDTTLYSTFEPCVMCAGAMVHSRIGNLVFGVRNAKTGAAGSLIDVLHHPGMNHRVEIAEGVLADECSAMLCRFFRHPRRVFNALKQAAKHD

SEQ ID NO: 254 - protein, 171 aa, synthetic construct
  REGION 1..171: note = APG08449
MSDIELNHEYWMRHALMLAKRAREEGEVPVGAVLVLNNQVIGEGWNRAIGLHDPTAHAEIMALRQGGLVLQNYRLYDTTLYSTFEPCVMCAGAMVHSRIGHLVFGVRNAKTGAAGSLIDVLHHPGMNHRIEFTEGVLADECSGMLCRFFRYPRRVFNTLKQAAKANPPAAQ

SEQ ID NO: 255 - protein, 173 aa, synthetic construct
  REGION 1..173: note = APG05174
MSIPELNHDVWMRHALTLAKRAREEGEVPVGAVLVLNGQVIGEGWNRAIGLHDPTAHAEIMALRQGGLVLQNYRLYDTTLYSTFEPCVMCAGAMVHSRIGQLVFGVRNAKTGAAGSLMDVLHHPGMNHRVEITEGVLRDECAAMLCRFFRQPRRVFNALKKPAGDPSALQNNR

SEQ ID NO: 256 - protein, 168 aa, synthetic construct
  REGION 1..168: note = APG09102
MSNPEFTHEYWMRHALTLARRARDEGEVPVGAVLVLNNQVIGEGWNRAIGLHDPTAHAEIMALRQGGLVLQNYRLYDTTLYSTFEPCVMCSGAMVHSRIGTLVFGVRNEKTGAAGSLMDVLGHPGMNHQVKTIGGVLAPECSGLLCRFFRMPRRVFNQQKAELKSSGD

SEQ ID NO: 257 - protein, 167 aa, synthetic construct
  REGION 1..167: note = APG05723
MSDAELTHEYWMRHALTLAQRARDEGEVPVGAVLVLNNQVIGEGWNRAIGLHDPTAHAEIMALRQGGLVQQNYRLYDTTLYSTFEPCVMCAGAMVHSRIGRLIFGVRNAKTGAAGSLIDVLHHPGMNHRVEVVEGILRDECAGMLCRFFRQPRRVFNALKKGATDVL

SEQ ID NO: 258 - protein, 169 aa, synthetic construct
  REGION 1..169: note = LPG50140
MSDLELNHEYWMRHALQLAKRARDEGEVPVGAVLVLNNQVIGEGWNRAIGLHDPTAHAEIMALRQGGLVLQNYRLIDTTLYVTFEPCVMCSGAMVHSRIGTLVFGVRNSKRGAAGSLMNVLNYPGMNHQVQIIDGVLAPECSGLLCDFYRMPRQVFNQQKAESTSINGD

SEQ ID NO: 259 - protein, 164 aa, synthetic construct
  REGION 1..164: note = LPG50141
MSNPELTHEHWMRYALTLAKRAREEGEVPVGAVLVLNNQVIGEGWNRAIGLHDPTAHAEIMALRQGGLVLQNYRLIDTTLYVTFEPCVMCAGAMVHSRIGQLVFGVRNSKRGAAGSLMNVLNYPGMNHRIEFTEGVLRDECAAMLCDFYRQPRQVFNALKTGNA

SEQ ID NO: 260 - protein, 169 aa, synthetic construct
  REGION 1..169: note = LPG50142
MSIPELNHDVWMRHALTLAKRAREEGEVPVGAVLVLNGQVIGEGWNRAIGLHDPTAHAEIMALRQGGLVLQNYRLIDTTLYVTFEPCVMCAGAMVHSRIGQLVFGVRNSKRGAAGSLINVLNYPGMNHRVAITEGVLREECAAMLCDFYRQPRQVFNALKKPAGDINAF

SEQ ID NO: 261 - protein, 172 aa, synthetic construct
  REGION 1..172: note = LPG50143
MSNPELNHEYWMRYALTLAKRARDEGEVPVGAVLVLNDQVIGEGWNRAIGLHDPTAHAEIMALRQGGLVLQNYRLIDTTLYVTFEPCVMCAGAMVHSRIGRLVFGVRNSKRGAAGSLLNVLNYPGMNHHIEMEEGVLRDECAAMLCDFYRQPRQVFNALKKSPPDINNLQAR

SEQ ID NO: 262 - protein, 169 aa, synthetic construct
  REGION 1..169: note = LPG50144
MSNPELTHDHWMRHALTLAQRARNEGEVPVGAVLVLNGQVIGEGWNRAIGLHDPTAHAEIMALRQGGLVLQNYRLIDTVLYVTFEPCVMCAGAMVHSRIGQLVFGVRNSKRGAAGSLINVLNYPGMNHRVEIIEGVLRDECAAMLCDFYRHPRQVFNALKKNAGTINTQ

SEQ ID NO: 263 - protein, 166 aa, synthetic construct
  REGION 1..166: note = LPG50145
MSDTELNHEYWMRHALMLAKRARDEGEVPVGAVLVLKNQVIGEGWNRAIGLHDPTAHAEIMALRQGGLVLQNYRLIDTTLYVTFEPCVMCAGAMVHSRIGNLVFGVRNSKRGAAGSLINVLNYPGMNHRVEIAEGVLADECSAMLCDFYRHPRQVFNALKQAAKHI

SEQ ID NO: 264 - protein, 171 aa, synthetic construct
  REGION 1..171: note = LPG50146
MSDIELNHEYWMRHALMLAKRAREEGEVPVGAVLVLNNQVIGEGWNRAIGLHDPTAHAEIMALRQGGLVLQNYRLIDTTLYVTFEPCVMCAGAMVHSRIGHLVFGVRNSKRGAAGSLINVLNYPGMNHRIEFTEGVLADECSGMLCDFYRYPRQVFNTLKQAAKAINPAAQ

SEQ ID NO: 265 - protein, 173 aa, synthetic construct
  REGION 1..173: note = LPG50147
MSIPELNHDVWMRHALTLAKRAREEGEVPVGAVLVLNGQVIGEGWNRAIGLHDPTAHAEIMALRQGGLVLQNYRLIDTTLYVTFEPCVMCAGAMVHSRIGQLVFGVRNSKRGAAGSLMNVLNYPGMNHRVEITEGVLRDECAAMLCDFYRQPRQVFNALKKPAGDINALQNNR

SEQ ID NO: 266 - protein, 167 aa, synthetic construct
  REGION 1..167: note = LPG50149
MSDAELTHEYWMRHALTLAQRARDEGEVPVGAVLVLNNQVIGEGWNRAIGLHDPTAHAEIMALRQGGLVQQNYRLIDTTLYVTFEPCVMCAGAMVHSRIGRLIFGVRNSKRGAAGSLINVLNYPGMNHRVEVVEGILRDECAGMLCDFYRQPRQVFNALKKGATDIN

SEQ ID NO: 267 - protein, 167 aa, synthetic construct
  REGION 1..167: note = LPG50150
MSDAELTHEYWMRHALTLAQRARDEGEVPVGAVLVLNNQVIGEGWNRAIGLHDPTAHAEIMALRQGGLVQQNYRLLDTTLYVTFEPCVMCAGAMVHSRIGRLIFGVRNSKRGAAGSLINVLNYPGMNHRVEVVEGILRDECAGMLCAFYRQPRAVKNALKKGATDVL

SEQ ID NO: 268 - protein, 169 aa, synthetic construct
  REGION 1..169: note = LPG50151
MSDLELNHEYWMRHALQLAQRARDEGEVPVGAVLVYNNQVIGEGWNRAIGLHDPTAHAEIMALRQGGLVLQNYRLLDTTLYVTFEPCVMCSGAMVHSRIGTLVFGVRNEKRGAAGSLMNVLRYPGMNHQVQIIDGVLAPECSGLLCDFYRMPRQQKNQQKAESTSSPGD

SEQ ID NO: 269 - protein, 167 aa, synthetic construct
  REGION 1..167: note = LPG50152
MSDNELNHEYWMRHALGLAKRAREEGEVPVGAVLVLNNQVIGEGWNRAIGLHDPTAHAEIMALRQGGLVLQNYRLTDTTLYVTFEPCVMCAGAMVHSRIGTLVFGVRNSKRGAAGSLMNVLNYPGMNHRVEIVEGILSESCAAMLCDFYRQPRAVKNALKKAADPAA

SEQ ID NO: 270 - protein, 164 aa, synthetic construct
  REGION 1..164: note = LPG50153
MSDTEFTHEHWMRHALTLAQRARDEGEVPVGAVLVLNNQVIGEGWNRAIGLHDPTAHAEIMALRQGGLVLQNYRLLDTTLYVTFEPCVMCAGAMVHSRIGHLVFGVRNSKRGAIGSLMNVLGYPGMNHQVQVSEGVLATECSAMLCDFYRAPRLVKNALKEKAR

SEQ ID NO: 271 - protein, 171 aa, synthetic construct
  REGION 1..171: note = LPG50154
MSESEFTHEHWMRHALTLARRAREEGEVPVGAVLVLNNQVIGEGWNRAIGLHDPTAHAEIMALRQGGLVLQNYRLLDSTLYVTFEPCVMCAGAMVHGRIGNLVFGVRNSKRGAIGSLMNVVGYPGMNHQINVIEGVLAEECSAMLCDFYRAPRLVKNALKEKARNGNNPNK

SEQ ID NO: 272 - protein, 164 aa, synthetic construct
  REGION 1..164: note = LPG50155
MSNPELTHEHWMRYALTLAKRAREEGEVPVGAVLVLNNQVIGEGWNRAIGLHDPTAHAEIMALRQGGLVLQNYRLIDTTLYVTFEPCVMCAGAMVHSRIGQLVFGVRNSKRGAAGSLMNVLNYPGMNHRIEFTEGVLRDECAAMLCDFYRQPRLVKNALKTGNA

SEQ ID NO: 273 - protein, 166 aa, synthetic construct
  REGION 1..166: note = LPG50156
MSDPELNHEYWMRHALQLAKRAREEGEVPVGAVLVLNNQVIGEGWNRAIGLHDPTAHAEIMALRQGGLVLQNYRLLDTTLYVTFEPCVMCSGAMIHSRIGTVVFGVRNEKRGAAGSLLNVLRYPGMNHQVNVLGGVLAPACSEMLCEFYRMPRQQKNRQKAESKLS

SEQ ID NO: 274 - protein, 166 aa, synthetic construct
  REGION 1..166: note = LPG50157
MSDNELNHEHWMRHALTLAQRAREEGEVPVGAVLVLQNQVIGEGWNRAIGLHDPTAHAEIMALRQGGMVLQNYRLIDTTLYVTFEPCVMCAGAMVHSRIGQLVFGVRNSKRGAAGSLINVLNYPGMNHRVEITEGVLADDCSSMLCDFYRHPREQKNALKRAAHSN

SEQ ID NO: 275 - protein, 168 aa, synthetic construct
  REGION 1..168: note = LPG50158
MSNPEHNHEYWMRHALTLAQRARDEGEVPVGAVLVYNNQVIGEGWNRAIGLHDPTAHAEIMALRQGGLVLQNYRLLDTTLYVTFEPCVMCSGAMVHSRIGTLVFGVRNEKRGAAGSLMNVLGYPGMNHQVQTIGGVLAPECSGLLCDFYRMPRQQKNQQKAELNQPGD

SEQ ID NO: 276 - protein, 168 aa, synthetic construct
  REGION 1..168: note = LPG50159
MSDLELNHEYWMRHALSLAKRARDEGEVPVGAVLVLNNQVIGEGWNRAIGLHDPTAHAEIMALRQGGLVLQNYRLLDTTLYVTFEPCVMCSGAMVHSRIGTLVYGVRNEKRGAAGSLMNVLGYPGMNHQVQIIGGVLAPDCSGLLCDFYRMPRQQKNQQKAELKSSGD

SEQ ID NO: 277 - protein, 166 aa, synthetic construct
  REGION 1..166: note = LPG50160
MSDHEFNDEYWMRHALTLAKRAREEGEVPVGAVLVLNNQVIGEGWNRAIGLHDPTAHAEIMALRQGGLVLQNYRLIDATLYVTFEPCVMCAGAMVHSRISRLVFGVRNSKRGAAGSLINVLNYPGMNHRVEITEGILAESCSAMLCDFYRWPREVKNALKKARQEE

SEQ ID NO: 278 - protein, 166 aa, synthetic construct
  REGION 1..166: note = LPG50161
MSQTELTHEYWMRHALTLAQRARDEGEVPVGAVLVLNNQVIGEGWNRAIGLHDPTAHAEIMALRQGGLVLQNYRLLDTTLYVTFEPCVMCAGAMVHGRIGTLVFGVRNSKRGAVGSLMNITGYPGMNHQVQVIEGILATECSAMLCAFYRQPRLVKNALKEAAKTA

SEQ ID NO: 279 - protein, 167 aa, synthetic construct
  REGION 1..167: note = LPG50162
MSNPELNHDYWMRHALSLAKRAREEGEVPVGAVLVRNNEVIGEGWNRAIGLHDPTAHAEIMALRQGGMVLQNYRLIDTTLYVTFEPCVMCAGAMVHSRIGQLVFGVRNSKRGAAGSLMNVLNYPGMNHRVEIVEGVLRDECAGMLCDFYRQPRLVKNAQKKGAEPLI

SEQ ID NO: 280 - protein, 172 aa, synthetic construct
  REGION 1..172: note = LPG50163
MSNPELNHEYWMRYALTLAKRARDEGEVPVGAVLVYNDQVIGEGWNRAIGLHDPTAHAEIMALRQGGLVLQNYRLIDTTLYVTFEPCVMCAGAMVHSRIGRLVFGVRNSKRGAAGSLLNVLNYPGMNHHIEMEEGVLRDECAAMLCDFYRQPRMVKNALKKSPPDSPNLQAR

SEQ ID NO: 281 - protein, 168 aa, synthetic construct
  REGION 1..168: note = LPG50164
MSNPEFTHEYWMRHALTLARRARDEGEVPVGAVLVLNNQVIGEGWNRAIGLHDPTAHAEIMALRQGGLVLQNYRLLDTTLYVTFEPCVMCSGAMVHSRIGTLVFGVRNEKRGAAGSLMNVLGYPGMNHQVKTIGGVLAPECSGLLCDFYRMPRQQKNQQKAELKSSGD

SEQ ID NO: 282 - protein, 165 aa, synthetic construct
  REGION 1..165: note = LPG50165
MSDNEFNHEYWMRHALTLAQRARDEGEVPVGAVLVLDNQVIGEGWNRAIGLHDPTAHAEIMALRQGGMVLQNYRLINATLYVTFEPCVMCAGAMVHSRIGHVVFGVRNSKRGAAGSLMNVLNYPGMNHRVEVTEGVLREQCAGMLCDFYREPREQFNALRKAQKA

SEQ ID NO: 283 - protein, 170 aa, synthetic construct
  REGION 1..170: note = LPG50166
MSDNELNHEYWMRHALTLAQRARDEGEVPVGAVLVLNNQVIGEGWNRAIGLHDPTAHAEIMALRQGGMVLQNYRLIDATLYVTFEPCIMCAGAMVHSRIGQVVFGVRNSKRGAAGSLINILNYPGMNHRVDVTEGVLSERCANMLCDFYREPRLQFNAQRKAEKAGNAAA

SEQ ID NO: 284 - protein, 169 aa, synthetic construct
  REGION 1..169: note = LPG50167
MSNPELTHDHWMRHALTLAQRARNEGEVPVGAVLVLNGQVIGEGWNRAIGLHDPTAHAEIMALRQGGLVLQNYRLIDTVLYVTFEPCVMCAGAMVHSRIGQLVFGVRNSKRGAAGSLINVLNYPGMNHRVEIIEGVLRDECAAMLCDFYRHPRLVKNALKKNAGTSPTQ

SEQ ID NO: 285 - protein, 166 aa, synthetic construct
  REGION 1..166: note = LPG50168
MSDTELNHEYWMRHALMLAKRARDEGEVPVGAVLVLKNQVIGEGWNRAIGLHDPTAHAEIMALRQGGLVLQNYRLIDTTLYVTFEPCVMCAGAMVHSRIGNLVFGVRNSKRGAAGSLINVLNYPGMNHRVEIAEGVLADECSAMLCDFYRHPRQQQNALKQAAKHD

SEQ ID NO: 286 - protein, 171 aa, synthetic construct
  REGION 1..171: note = LPG50169
MSDIELNHEYWMRHALMLAKRAREEGEVPVGAVLVLNNQVIGEGWNRAIGLHDPTAHAEIMALRQGGLVLQNYRLIDTTLYVTFEPCVMCAGAMVHSRIGHLVFGVRNSKRGAAGSLINVLNYPGMNHRIEFTEGVLADECSGMLCDFYRYPRQQQNTLKQAAKANPPAAQ

SEQ ID NO: 287 - protein, 165 aa, synthetic construct
  REGION 1..165: note = LPG50170
MSDNELNHERWMRHALTLAQRARDEGEVPVGAVLVYQNQVIGEGWNRAIGLHDPTAHAEIMALRQGGLVLQNYRLIDTTLYVTFEPCVMCAGAMVHSRIGQLVFGVRNSKRGAAGSLINVLNYPGMNHRVAITEGVLAESCSAMLCDFYRHPREQKNALRRAAQS

SEQ ID NO: 288 - protein, 166 aa, synthetic construct
  REGION 1..166: note = LPG50171
MSDLELNDEYWMRHALTLAKRAREEGEVPVGAVLVLNNQVIGEGWNRAIGLHDPTAHAEIMALRQGGLVLQNYRLIDATLYVTFEPCVMCAGAMVHSRIARLVFGVRNSKRGAAGSLMNVLNYPGMNHRVEISEGVLAESCSAMLCDFYRWPREVKNALKKAREQN

SEQ ID NO: 289 - protein, 169 aa, synthetic construct
  REGION 1..169: note = LPG50172
MSDLELDHEYWMRHALLLAKRARDEGEVPVGAVLVLNNQVIGEGWNRAIGLHDPTAHAEIMALRQGGLVLQNYRLLDTTLYVTFEPCVMCSGAMVHSRIGTLVYGVRNEKRGAAGSLMNVLGYPGMNHQVQVIDGVLAPECSGLLCDFYRMPRQQKNQQKAESTSSRGD

SEQ ID NO: 290 - protein, 162 aa, synthetic construct
  REGION 1..162: note = LPG50173
MSDTELTHEYWMRHALMLAQRARDEGEVPVGAVLVLNNRVIGEGWNRAIGLHDPTAHAEIMALRQGGLVLQNYRLLDTTLYVTFEPCVMCAGAMVHGRIGTLVFGVRNLKRGAAGSLMNVLNYPGMNHRVEIVEGTLSDECSGMLCEFYRQPRLAFNAQKQA

SEQ ID NO: 291 - protein, 173 aa, synthetic construct
  REGION 1..173: note = LPG50174
MSIPELNHDVWMRHALTLAKRAREEGEVPVGAVLVLNGQVIGEGWNRAIGLHDPTAHAEIMALRQGGLVLQNYRLIDTTLYVTFEPCVMCAGAMVHSRIGQLVFGVRNSKRGAAGSLMNVLNYPGMNHRVEITEGVLRDECAAMLCDFYRQPRLVKNALKKPAGDPSALQNNR

SEQ ID NO: 292 - protein, 166 aa, synthetic construct
  REGION 1..166: note = LPG50175
MSDLELNDEYWMRHALTLAKRAREEGEVPVGAVLVLNNQVIGEGWNRAIGLHDPTAHAEIMALRQGGLVLQNYRLIDATLYVTFEPCVMCAGAMVHSRIARLVFGVRNSKRGAAGSLMNVLNYPGMNHRVEISEGVLAGSCSAMLCDFYRWPREVKNALKKAREQN

SEQ ID NO: 293 - protein, 153 aa, synthetic construct
  REGION 1..153: note = LPG50176
MSDIEQNHEYWMRHALVLAKRAREEGEVPVGAVLVLNNQVIGEGWNRAIGLHDPTAHAEIMALRQGGLVLQNYRLIDTTLYVTFEPCVMCAGAMVHGRIGSLVFGVRNSKRGAAGSLINVLNYPGMNHRVEMTEGVLADECSAMLCDFYRHPR

SEQ ID NO: 294 - protein, 168 aa, synthetic construct
  REGION 1..168: note = LPG50177
MCNPERDHEYWMRHALTLAQRARDEGEVPVGAVLVLNNQVIGEGWNRAIGLHDPTAHAEIMALRQGGMVLQNYRLLDTTLYVTFEPCVMCSGAMVHSRIGTLVFGVRNEKRGAAGSLLNVLGYPGMNHQVKTIGGVLAPACSALLCDFYRMPRQQKNQQKAELKLSND

SEQ ID NO: 295 - protein, 162 aa, synthetic construct
  REGION 1..162: note = LPG50178
MSAIELNHEYWMRHALGLAQRARDEGEVPVGAVLVYQNQVIGEGWNRAIGLHDPTAHAEIMALRQGGLVLQNYRLIDTTLYVTFEPCVMCAGAMVHSRIGRVVFGVRNSKRGAAGSLMNVLNYPGMNHRVEVTEGVLAGECSAMLCDFYRAPRAQFNAQKRP

SEQ ID NO: 296 - protein, 169 aa, synthetic construct
  REGION 1..169: note = LPG50179
MSNPELNHEYWMRYALTLAKRAREEGEVPVGAVLVLNERVIGEGWNRAIGLHDPTAHAEIMALRQGGMVLQNYRLIDTTLYVTFEPCVMCAGAMVHSRIGHLVFGVRNSKRGAAGSLMNVLNYPGMNHRVAITEGVLRDECAAMLCDFYRQPRQVKNALKKTLSDSQEQ

SEQ ID NO: 297 - protein, 168 aa, synthetic construct
  REGION 1..168: note = LPG50180
MSNPEHDHEYWMRHALNLAQRARDEGEVPVGAVLVLNNQVIGEGWNRAIGLHDPTAHAEIMALRQGGLVLQNYRLLDTTLYVTFEPCVMCSGAMVHSRIGTLVYGVRNEKRGAAGSLMNVLGYPGMNHQVNVIGGVLAQDCSARLCDFYRMPRQQKNQQRAELKAQGD

SEQ ID NO: 298 - protein, 168 aa, synthetic construct
  REGION 1..168: note = LPG50181
MSDPELNHEYWMRHALQLAQRARDEGEVPVGAVLVLNNQVIGEGWNRAIGLHDPTAHAEIMALRQGGLVLQNYRLLDTTLYVTFEPCVMCSGAMIHSRIGTVVYGVRNEKRGAAGSLLNVLSYPGMNHQVKVIGEVLAPACSAMLCDFYRMPRQQKNQQKAEWKLSGE

SEQ ID NO: 299 - protein, 171 aa, synthetic construct
  REGION 1..171: note = LPG50182
MSNPELNHEYWMRYALTLAKRARDEGEVPVGAVLVYHDQVIGEGWNRAIGLHDPTAHAEIMALRQGGLVLQNYRLIDTTLYVTFEPCVMCAGAMVHSRIGRLVFGVRNSKRGAAGSLLNVLNYPGMNHQIDMEEGVLRDECAAMLCDFYRLPRIVKNALKQSPPDSTNLHA

SEQ ID NO: 300 - protein, 167 aa, synthetic construct
  REGION 1..167: note = LPG50148.2.1
SNPEFTHEYWMRHALTLARRARDEGEVPVGAVLVNNNQVIGEGWNRAIGLHDPTAHAEIMALRQGGLVLQNYRLIDTTLYVTFEPCVMCSGAMVHSRIGTLVFGVRNSKRGAAGSLMNVLNYPGMNHQVKTIGGVLAPECSGLLCDFYRMPRQVFNQQKAELKSIND

SEQ ID NO: 301 - protein, 167 aa, synthetic construct
  REGION 1..167: note = LPG50148.2.2
SNPEFTHEYWMRHALTLARRARDEGEVPVGAVLVLNNQVIGEGWNQAIGLHDPTAHAEIMALRQGGLVLQNYRLIDTTLYVTFEPCVMCSGAMVHSRIGTLVFGVRNSKRGAAGSLMNVLNYPGMNHQVKTIGGVLAPECSGLLCDFYRMPRQVFNQQKAELKSIND

SEQ ID NO: 302 - protein, 167 aa, synthetic construct
  REGION 1..167: note = LPG50148.2.3
SNPEFTHEYWMRHALTLARRARDEGEVPVGAVLVLNNQVIGEGWNRAIGLHDPTAHAEIMALRQGGLMLQNYRLIDTTLYVTFEPCVMCSGAMVHSRIGTLVFGVRNSKRGAAGSLMNVLNYPGMNHQVKTIGGVLAPECSGLLCDFYRMPRQVFNQQKAELKSIND

SEQ ID NO: 303 - protein, 167 aa, synthetic construct; identical to SEQ ID NO: 6
  REGION 1..167: note = LPG50148.2.4

SEQ ID NO: 304 - protein, 167 aa, synthetic construct
  REGION 1..167: note = LPG50148.2.5
SNPEFTHEYWMRHALTLARRARDEGEVPVGAVLVLNNQVIGEGWNRAIGLHDPTAHAEIMALRQGGLVLQNYRLIDTTLYVTFEPCVMCSGAMVHSRIGTLVFGVRNHKRGAAGSLMNVLNYPGMNHQVKTIGGVLAPECSGLLCDFYRMPRQVFNQQKAELKSIND

SEQ ID NO: 305 - protein, 167 aa, synthetic construct
  REGION 1..167: note = LPG50148.2.6
SNPEFTHEYWMRHALTLARRARDEGEVPVGAVLVLNNQVIGEGWNRAIGLHDPTAHAEIMALRQGGLVLQNYRLIDTTLYVTFEPCVMCSGAMVHSRIGTLVFGVRNSKRGAAGSLMNVLTYPGMNHQVKTIGGVLAPECSGLLCDFYRMPRQVFNQQKAELKSIND

SEQ ID NO: 306 - protein, 167 aa, synthetic construct
  REGION 1..167: note = LPG50148.2.7
SNPEFTHEYWMRHALTLARRARDEGEVPVGAVLVLNNQVIGEGWNRAIGLHDPTAHAEIMALRQGGLVLQNYRLIDTTLYVTFEPCVMCSGAMVHSRIGTLVFGVRNSKRGAAGSLMNVLNYPGMNHQVKTIGGVLAPECSGLLCDFYRMPRQVWNQQKAELKSIND

SEQ ID NO: 307 - protein, 167 aa, synthetic construct
  REGION 1..167: note = LPG50148.2.8
SNPEFTHEYWMRHALTLARRARDEGEVPVGAVLVLNNQVIGEGWNRAIGLHDPTAHAEIMALRQGGLVLQNYRLIDTTLYVTFEPCVMCSGAMVHSRIGTLVFGVRNSKRGAAGSLMNVLNYPGMNHQVKTIGGVLAPECSGLLCDFYRMPRQVFRQQKAELKSIND

SEQ ID NO: 308 - protein, 167 aa, synthetic construct
  REGION 1..167: note = LPG50148.2.9
SNPEFTHEYWMRHALTLARRARDEGEVPVGAVLVLNNQVIGEGWNRAIGLHDPTAHAEIMALRQGGLVLQNYRLIDTTLYVTFEPCVMCSGAMVHSRIGTLVFGVRNSKRGAAGSLMNVLNYPGMNHQVKTIGGVLAPECSGLLCDFYRMPRQVFNQQKAEWKSIND

SEQ ID NO: 309 - protein, 167 aa, synthetic construct
  REGION 1..167: note = LPG50148.2.10
SNPEFTHEYWMRHALTLARRARDEGEVPVGAVLVLNNQVIGEGWNRAIGLHDPTAHAEIMALRQGGLVLQNYRLIDTTLYVTFEPCVMCSGAMVHSRIGTLVFGVRNSKRGAAGSLMNVLNYPGMNHQVKTIGGVLAPECSGLLCDFYRMPRQVFNQQKAEHKSIND

SEQ ID NO: 310 - protein, 167 aa, synthetic construct
  REGION 1..167: note = LPG50148.2.11
SNPEFTHEYWMRHALTLARRARDEGEVPVGAVLVNNNQVIGEGWNRAIGLHDPTAHAEIMALRQGGLVLQNYRLIDTTLYVTFEPCVMCSGAMVHSRIGTLVFGVRNSKRGAAGSLMNVLNYPGMNHQVKTIGGVLAPECSGLLCDFYRMPRQVFNQQKAEWKSIND

SEQ ID NO: 311 - protein, 167 aa, synthetic construct
  REGION 1..167: note = LPG50148.2.12
SNPEFTHEYWMRHALTLARRARDEGEVPVGAVLVNNNQVIGEGWNQAIGLHDPTAHAEIMALRQGGLVLQNYRLIDTTLYVTFEPCVMCSGAMVHSRIGTLVFGVRNSKRGAAGSLMNVLNYPGMNHQVKTIGGVLAPECSGLLCDFYRMPRQVFNQQKAELKSIND

SEQ ID NO: 312 - protein, 167 aa, synthetic construct
  REGION 1..167: note = LPG50148.2.13
SNPEFTHEYWMRHALTLARRARDEGEVPVGAVLVLNNQVIGEGWNRAIGLHDPTAHAEIMALRQGGLVLQNYRLIDTTLYSTFEPCVMCSGAMVHSRIGTLVFGVRNSKRGAAGSLMNVLNYPGMNHQVKTIGGVLAPECSGLLCDFYRMPRQVFRQQKAELKSIND

SEQ ID NO: 313 - protein, 167 aa, synthetic construct
  REGION 1..167: note = LPG50148.2.14
SNPEFTHEYWMRHALTLARRARDEGEVPVGAVLVLNNQVIGEGWNQAIGLHDPTAHAEIMALRQGGLVLQNYRLIDTTLYVTFEPCVMCSGAMVHSRIGTLVFGVRNSKRGAAGSLMNVLNYPGMNHQVKTIGGVLAPECSGLLCDFYRMPRQVFRQQKAELKSIND

SEQ ID NO: 314 - protein, 167 aa, synthetic construct
  REGION 1..167: note = LPG50148.2.15
SNPEFTHEYWMRHALTLARRARDEGEVPVGAVLVLNNQVIGEGWNRAIGLHDPTAHAEIMALRQGGLVLQNYRLIDTTLYVTFEPCVMCSGAMVHSRIGTLVFGVRNSKRGAAGSLMNVLNYPGMNHQVKTIGGVLAPECSGLLCDFYRMPRQVFRQQKAEWKSIND

SEQ ID NO: 315 - protein, 167 aa, synthetic construct
  REGION 1..167: note = LPG50148.2.16
SNPEFTHEYWMRHALTLARRARDEGEVPVGAVLVNNNQVIGEGWNRAIGLHDPTAHAEIMALRQGGLVLQNYRLIDTTLYSTFEPCVMCSGAMVHSRIGTLVFGVRNSKRGAAGSLMNVLNYPGMNHQVKTIGGVLAPECSGLLCDFYRMPRQVFNQQKAEWKSIND

SEQ ID NO: 316 - protein, 167 aa, synthetic construct
  REGION 1..167: note = LPG50148.2.17
SNPEFTHEYWMRHALTLARRARDEGEVPVGAVLVNNNQVIGEGWNQAIGLHDPTAHAEIMALRQGGLVLQNYRLIDTTLYVTFEPCVMCSGAMVHSRIGTLVFGVRNSKRGAAGSLMNVLNYPGMNHQVKTIGGVLAPECSGLLCDFYRMPRQVFNQQKAEWKSIND

SEQ ID NO: 317 - protein, 167 aa, synthetic construct
  REGION 1..167: note = LPG50148.2.18
SNPEFTHEYWMRHALTLARRARDEGEVPVGAVLVLNNQVIGEGWNRAIGLHDPTAHAEIMALRQGGLVLQNYRLIDTTLYVTFEPCVMCSGAMVHSRIGTLVFGVRNSKRGAAGSLMNVLNYPGMNHQVKTIGGVLAPECSGLLCDFYRMPRQVWRQQKAEWKSIND

SEQ ID NO: 318 - protein, 167 aa, synthetic construct
  REGION 1..167: note = LPG50148.2.19
SNPEFTHEYWMRHALTLARRARDEGEVPVGAVLVNNNQVIGEGWNRAIGLHDPTAHAEIMALRQGGLVLQNYRLIDTTLYVTFEPCVMCSGAMVHSRIGTLVFGVRNSKRGAAGSLMNVLNYPGMNHQVKTIGGVLAPECSGLLCDFYRMPRQVFRQQKAEWKSIND

SEQ ID NO: 319 - protein, 167 aa, synthetic construct
  REGION 1..167: note = LPG50148.2.20
SNPEFTHEYWMRHALTLARRARDEGEVPVGAVLVNNNQVIGEGWNRAIGLHDPTAHAEIMALRQGGLVLQNYRLIDTTLYSTFEPCVMCSGAMVHSRIGTLVFGVRNSKRGAAGSLMNVLNYPGMNHQVKTIGGVLAPECSGLLCDFYRMPRQVFRQQKAEWKSIND

SEQ ID NO: 320 - protein, 167 aa, synthetic construct
  REGION 1..167: note = LPG50148.2.21
SNPEFTHEYWMRHALTLARRARDEGEVPVGAVLVLNNQVIGEGWNRAIGLHDPTAHAEIMALRQGGLMLQNYRLIDTTLYVTFEPCVMCSGAMVHSRIGTLVFGVRNHKRGAAGSLMNVLNYPGMNHQVKTIGGVLAPECSGLLCDFYRMPRQVFRQQKAEWKSIND

SEQ ID NO: 321 - protein, 167 aa, synthetic construct
  REGION 1..167: note = LPG50148.2.22
SNPEFTHEYWMRHALTLARRARDEGEVPVGAVLVLNNQVIGEGWNQAIGLHDPTAHAEIMALRQGGLMLQNYRLIDTTLYVTFEPCVMCSGAMVHSRIGTLVFGVRNHKRGAAGSLMNVLNYPGMNHQVKTIGGVLAPECSGLLCDFYRMPRQVFRQQKAEWKSIND

SEQ ID NO: 322 - protein, 167 aa, synthetic construct
  REGION 1..167: note = LPG50148.2.23
SNPEFTHEYWMRHALTLARRARDEGEVPVGAVLVLNNQVIGEGWNRAIGLHDPTAHAEIMALRQGGLMLQNYRLIDTTLYSTFEPCVMCSGAMVHSRIGTLVFGVRNHKRGAAGSLMNVLNYPGMNHQVKTIGGVLAPECSGLLCDFYRMPRQVFRQQKAEWKSIND

SEQ ID NO: 323 - protein, 167 aa, synthetic construct
  REGION 1..167: note = LPG50148.2.24
SNPEFTHEYWMRHALTLARRARDEGEVPVGAVLVNNNQVIGEGWNQAIGLHDPTAHAEIMALRQGGLMLQNYRLIDTTLYSTFEPCVMCSGAMVHSRIGTLVFGVRNHKRGAAGSLMNVLNYPGMNHQVKTIGGVLAPECSGLLCDFYRMPRQVWRQQKAEWKSIND

SEQ ID NO: 324 - protein, 167 aa, synthetic construct
  REGION 1..167: note = LPG50148.2.25
SNPEFTHEYWMRHALTLARRARDEGEVPVGAVLVLNNQVIGEGWNRAIGLHDPTAHAEIMALRQGGLVLQNYRLIDTTLYVTFEPCVMCSGAMVHSRIGTLVFGVRNSKRGAAGSLINVLNYPGMNHQVKTIGGVLAPECSGLLCDFYRMPRQVFNQQKAELKSIND

SEQ ID NO: 325 - protein, 167 aa, synthetic construct
  REGION 1..167: note = LPG50148.2.26
SNPEFTHEYWMRHALTLARRARDEGEVPVGAVLVLNNQVIGEGWNRAIGLHDPTAHAEIMALRQGGLVLQNYRLIDTTLYVTFEPCVMCSGAMVHSRIGTLVFGVRNSKRGAAGSLMNVLNYPGMNHQVKTIGGVLAYECSGLLCDFYRMPRQVFNQQKAELKSIND

SEQ ID NO: 326 - protein, 167 aa, synthetic construct
  REGION 1..167: note = LPG50148.2.27
SNPEFTHEYWMRHALTLARRARDEGEVPVGAVLVLNNQVIGEGWNRAIGLHDPTAHAEIMALRQGGLVLQNYRLWDTTLYVTFEPCVMCSGAMVHSRIGTLVFGVRNSKRGAAGSLMNVLNYPGMNHQVKTIGGVLAPECSGLLCDFYRMPRQVFNQQKAELKSIND

SEQ ID NO: 327 - protein, 167 aa, synthetic construct
  REGION 1..167: note = LPG50148.2.28
SNPEFTHEYWMRHALTLARRARDEGEVPVGAVLVLNNQVIGEGWNRAIGLHDPTAHAEIMALRQGGLVLQNYRLIDTTLYVTFEPCVMCSGAMVHSRIGTLVFGVRNSKRGAAGSLMNVLNYPGMNHQVKTIGGVLAPECSGLLCDFYRMPRQVFNQQKDELKSIND

SEQ ID NO: 328 - protein, 167 aa, synthetic construct
  REGION 1..167: note = LPG50148.2.29
SNPEFTHEYWMRHALTLARRARDEGEVPVGAVLVLNNQVIGEGWNRAIGLHDPTAHAEIMALRQGGLVLQNYRLIDTTLYVTFEPCVMCSGAMVHSRIGTLVFGVRNSKRGAAGSLMNVLNYPGKNHQVKTIGGVLAPECSGLLCDFYRMPRQVFNQQKAELKSIND

SEQ ID NO: 329 - protein, 167 aa, synthetic construct
  REGION 1..167: note = LPG50148.2.30
SNPEFTHEYWMRHALTLARRARDEGEVPVGAVLVLNNQVIGEGWNRAIGLHDPTAHAEIMALRQGGLVLQNYRLIDTTLYVTFEPCVMCSGAMVHSRIGTLVFGVRNSKRGAAGSLMNVLNYPGMAHQVKTIGGVLAPECSGLLCDFYRMPRQVFNQQKAELKSIND

SEQ ID NO: 330 - protein, 167 aa, synthetic construct
  REGION 1..167: note = LPG50148.2.31
SNPEFTHEYWMRHALTLARRARDEGEVPVGAVLVLNNQVIGEGWNRAIGLHDPTAHAEIMALRQGGLVLQNYRLIDTTLYVTFEPCVMCSGAMVHSRIGTLVFGVRNSKRGAAGSLMNVLNYPGMNHQVKTIGGVLAPECSGLLCDFYRMPRQVFNQRKAELKSIND

SEQ ID NO: 331 - protein, 167 aa, synthetic construct
  REGION 1..167: note = LPG50148.2.32
SNPEFTHEYWMRHALTLARRARDEGEVPVGAVLVLNNQVIGEGWNRAIGLHDPTAHAEIMALRQGGLVLQNYRLIDTTLYVTFEPCVMCSGAMVHSRIGTLVFGVRNSKRGAAGSLMNVLNYPGMNHQVKTIGGVLAPLCSGLLCDFYRMPRQVFNQQKAELKSIND

SEQ ID NO: 332 - protein, 167 aa, synthetic construct
  REGION 1..167: note = LPG50148.2.33
SNPEFTHEYWMRHALTLARRARDEGEVPVGAVLVLNNQVIGEGWNRAIGLHDPTAHAEIMALRQGGLVLQNYRLIDTTLYVTFEPCVMCSGAMVHSRIGTLVFGVRNSKRGAAGSLMNVLNYPGMNHQVKTIGGVLAPECSGLLADFYRMPRQVFNQQKAELKSIND

SEQ ID NO: 333 - protein, 167 aa, synthetic construct
  REGION 1..167: note = LPG50148.2.34
SNPEFTHEYWMRHALTLARRARDEGEVPVGAVLVLNNQVIGEGWNRAIGLHDPTAHAEIMALRQGGLVLQNYRLIDTTLYVTFEPCVMCSGAMVHSRIGTLVFGVRNSKRGAAGSLMNVLNYPGMNHQVKTIGGVLAPECSGLLCDFYRMPRQVFNQQKAEVKSIND

SEQ ID NO: 334 - protein, 167 aa, synthetic construct
  REGION 1..167: note = LPG50148.2.35
SNPEFTHEYWMRHALTLARRARDEGEVPVGAVLVLNNQVIGEGWNRAIGLHDPTAHAEIMALRQGGLVLQNYRLIDTTLYVTFEPCVMCSGAMVHSRIGTLVFGVRNSKRGAAGSLMNVLEYPGMNHQVKTIGGVLAPECSGLLCDFYRMPRQVFNQQKAELKSIND

SEQ ID NO: 335 - protein, 167 aa, synthetic construct
  REGION 1..167: note = LPG50148.2.36
SNPEFTHEYWMRHALTLARRARDEGEVPVGAVLVLNNQVIGEGWNRAIGLHDPTAHAEIMALRQGGLVLQNYRLIDTTLYVTFEPCVMCSGAMVHSRIGTLVFGVRNSKRGAAGSLMNVFNYPGMNHQVKTIGGVLAPECSGLLCDFYRMPRQVFNQQKAELKSIND

SEQ ID NO: 336 - protein, 167 aa, synthetic construct
  REGION 1..167: note = LPG50148.2.37
SNPEFTHEYWMRHALTLARRARDEGEVPVGAVLVLNNQVIGEGWNRAIGLHDPTAHAEIMALRQGGLVLQNYRLIDTTLYVTFEPCVMCSGAMVHSRIGTLVFGVRNSKRGAAGSLMNVLNYPGMNHQVKTIGGVLAPECSGLLCDFYRMQRQVFNQQKAELKSIND

SEQ ID NO: 337 - protein, 167 aa, synthetic construct
  REGION 1..167: note = LPG50148.2.38
SNPEFTHEYWMRHALTLARRARDEGEVPVGAVLVLNNQVIGEGWNRAIGLHDPTAHAEIMALRQGGLVLQNYRLIDTTLYVTFEPCVMCSGAMVHSRIGTLVFGVRNSKRGAAGSLMNVLNYPGMNHQVKTIGGVLAPECSGLLCDFKRMPRQVFNQQKAELKSIND

SEQ ID NO: 338 - protein, 167 aa, synthetic construct
  REGION 1..167: note = LPG50148.2.39
SNPEFTHEYWMRHALTLARRARDEGEVPVGAVLVLNNQVIGEGWNRAIGLHDPTAHAEIMALRQGGLVLQNYRLIDTTLYVTFEPCVMCSGAMVHSRIGTLVFGVRNSKRGAAGSLMNVLNYPGMNHQVKTIGGVLAPECSKLLCDFYRMPRQVFNQQKAELKSIND

SEQ ID NO: 339 - protein, 167 aa, synthetic construct
  REGION 1..167: note = LPG50148.2.40
SNPEFTHEYWMRHALTLARRARDEGEVPVGAVLVLNNQVIGEGWNRAIGLHDPTAHAEIMALRQGGLVLQNYRLIDTTLYVTFEPCVMCSGAMVHSRIGTLVFGVRNSKRGAAGSLMNVLNYPGMNHQVKTIGGVLAPECSGLLCDFYRMPRQVFNQQKAELKSRND

SEQ ID NO: 340 - protein, 167 aa, synthetic construct
  REGION 1..167: note = LPG50148.2.41
SNPEFTHEYWMRHALTLARRARDEGEVPVGAVLVLNNQVIGEGWNRAIGLHDPTAHAEIMALRQGGLVLQNYRLIDTTLYVTFEPCVMCSGAMVHSRIGTLVFGVRNSKRGAAGSLMNVLNYPGMNHQVKTIGGVLAPECSGLLCDFYRMPRQVFNQQKAELKSIHD

SEQ ID NO: 341 - protein, 167 aa, synthetic construct
  REGION 1..167: note = LPG50148.2.42
SCPEFTHEYWMRHALTLARRARDEGEVPVGAVLVLNNQVIGEGWNRAIGLHDPTAHAEIMALRQGGLVLQNYRLIDTTLYVTFEPCVMCSGAMVHSRIGTLVFGVRNSKRGAAGSLMNVLNYPGMNHQVKTIGGVLAPECSGLLCDFYRMPRQVFNQQKAELKSIND

SEQ ID NO: 342 - protein, 167 aa, synthetic construct
  REGION 1..167: note = LPG50148.2.43
SNPEFTHEYWMRHALTLARRARQEGEVPVGAVLVLNNQVIGEGWNRAIGLHDPTAHAEIMALRQGGLVLQNYRLIDTTLYVTFEPCVMCSGAMVHSRIGTLVFGVRNSKRGAAGSLMNVLNYPGMNHQVKTIGGVLAPECSGLLCDFYRMPRQVFNQQKAELKSIND

SEQ ID NO: 343 - protein, 167 aa, synthetic construct
  REGION 1..167: note = LPG50148.2.44
SNPEFTHEYWMRHALTLARRARDEGEVPVGAVLVLNNQVIGEGWNRAIGLHDPTAHAEIMALRQGGLVLQNYRLIDTTLYVTFEPCVMCSGAMVHSRIGTLVFGVRNSKRGAAGSLMNVLNYPGMNHQVKTIGHVLAPECSGLLCDFYRMPRQVFNQQKAELKSIND

SEQ ID NO: 344 - protein, 167 aa, synthetic construct
  REGION 1..167: note = LPG50148.2.45
SNPEFTHEYWMRHALTLARRARDEGEVPVGAVLVLNNQVIGEGWNRAIGLHDPTAHAEIMALRQGGLVLQNYRLIDTTLYVTFEPCVMCSGAMVHSRIGTLVFGVRNSKRGAAGSLMNVLNYPGMNHQVKTIGGVLVPECSGLLCDFYRMPRQVFNQQKAELKSIND

SEQ ID NO: 345 - protein, 167 aa, synthetic construct
  REGION 1..167: note = LPG50148.2.46
SNPEFTHEYWMRHALTLARRARDEGEVPVGAVLVLNNQVIGEGWNRAIGLHDPTAHAEIMALRQGGLVLQNYRLIDTTLYVTFEPCVMCSGAMVHSRIGTLVFGVRNSKRGAAGSLMNVLNYPGMNHQVKTIGGVLAPECSGLLCDFYRMPRQVFNQQKAEAKSIND

SEQ ID NO: 346 - protein, 167 aa, synthetic construct
  REGION 1..167: note = LPG50148.2.47
SNPEFTHEYWMRHALTLARRAFDEGEVPVGAVLVLNNQVIGEGWNRAIGLHDPTAHAEIMALRQGGLVLQNYRLIDTTLYVTFEPCVMCSGAMVHSRIGTLVFGVRNSKRGAAGSLMNVLNYPGMNHQVKTIGGVLAPECSGLLCDFYRMPRQVFNQQKAELKSIND

SEQ ID NO: 347 - protein, 167 aa, synthetic construct
  REGION 1..167: note = LPG50148.2.48
SNPEFTHEYWMRHALTLARRARDEGEVPVGAVLVLNNQVIGEGWNRAIGLHDPTAHAEIMALRQGGLALQNYRLIDTTLYVTFEPCVMCSGAMVHSRIGTLVFGVRNSKRGAAGSLMNVLNYPGMNHQVKTIGGVLAPECSGLLCDFYRMPRQVFNQQKAELKSIND

SEQ ID NO: 348 - protein, 167 aa, synthetic construct
  REGION 1..167: note = LPG50148.2.49
SNPEFTHEYWMRHALTLARRARDEGEVPVGAVLVLNNQVIGEGWNRAIGLHDPTAHAEIMALRQGGLVLQNHRLIDTTLYVTFEPCVMCSGAMVHSRIGTLVFGVRNSKRGAAGSLMNVLNYPGMNHQVKTIGGVLAPECSGLLCDFYRMPRQVFNQQKAELKSIND

SEQ ID NO: 349 - protein, 167 aa, synthetic construct
  REGION 1..167: note = LPG50148.2.50
SNPEFTHEYWMRHALTLARRARDEGEVPVGAVLVLNNQVIGEGWNRAIGLHDPTAHAEIMALRQGGLVLQNYRLDDTTLYVTFEPCVMCSGAMVHSRIGTLVFGVRNSKRGAAGSLMNVLNYPGMNHQVKTIGGVLAPECSGLLCDFYRMPRQVFNQQKAELKSIND

SEQ ID NO: 350 - protein, 167 aa, synthetic construct
  REGION 1..167: note = LPG50148.2.51
SNPEFTHEYWMRHALTLARRARDEGEVPVGAVLVLNNQVIGEGWNRAIGLHDPTAHAEIMALRQGGLVLQNYRLIGTTLYVTFEPCVMCSGAMVHSRIGTLVFGVRNSKRGAAGSLMNVLNYPGMNHQVKTIGGVLAPECSGLLCDFYRMPRQVFNQQKAELKSIND

SEQ ID NO: 351 - protein, 167 aa, synthetic construct
  REGION 1..167: note = LPG50148.2.52
SNPEFTHEYWMRHALTLARRARDEGEVPVGAVLVLNNQVIGEGWNRAIGLHDPTAHAEIMALRQGGLVLQNYRLIDTTLYVTFEPCVMCSGAMVHSRIGTLVFGVRNSKRGAAGSLLNVLNYPGMNHQVKTIGGVLAPECSGLLCDFYRMPRQVFNQQKAELKSIND

SEQ ID NO: 352 - protein, 167 aa, synthetic construct
  REGION 1..167: note = LPG50148.2.53
SNPEFTHEYWMRHALTLARRARDEGEVPVGAVLVLNNQVIGEGWNRAIGLHDPTAHAEIMALRQGGLVLQNYRLIDTTLYVTFEPCVMCSGAMVHSRIGTLVFGVRNSKRGAAGSLMNVLNIPGMNHQVKTIGGVLAPECSGLLCDFYRMPRQVFNQQKAELKSIND

SEQ ID NO: 353 - protein, 167 aa, synthetic construct
  REGION 1..167: note = LPG50148.2.54
SNPEFTHEYWMRHALTLARRARDEGEVPVGAVLVLNNQVIGEGWNRAIGLHDPTAHAEIMALRQGGLVLQNYRLIDTTLYVTFEPCVMCSGAMVHSRIGTLVFGVRNSKRGAAGSLMNVLNYPGMNHQVKTIGGVLAPECSGLLCDFYRMPRQVVNQQKAELKSIND

SEQ ID NO: 354 - protein, 167 aa, synthetic construct
  REGION 1..167: note = LPG50148.2.55
SNPEFTHEYWMRHALTLARRARDEGEVPVGAVLVLNNQVIGEGWNRAIGLHDPTAHAEIMALRQGGLVLQNYRLIDTTLYVTFEPCVMCSGAMVHSRIGTLVFGVRNSKRGAAGSLMNVLNYPGMNHQVKTIGGVLAPECSGLLCDFYRMPRQVFNFQKAELKSIND

SEQ ID NO: 355 - protein, 167 aa, synthetic construct
  REGION 1..167: note = LPG50148.2.56
SNPEFTHEYWMRHALTLARRARDEGEVPVGAVLVLNNQVIGEGWNRAIGLHDPTAHAEIMALRQGGLVLQNYRLIDTTLYSTFEPCVMCSGAMVHSRIGTLVFGVRNSKRGAAGSLMNVLNYPGMNHQVKTIGGVLAPECSGLLCDFYRMPRQVWNQQKAELKSIND

SEQ ID NO: 356 - protein, 167 aa, synthetic construct
  REGION 1..167: note = LPG50148.2.57
SNPEFTHEYWMRHALTLARRARDEGEVPVGAVLVLNNQVIGEGWNRAIGLHDPTAHAEIMALRQGGLVLQNYRLWDTTLYSTFEPCVMCSGAMVHSRIGTLVFGVRNSKRGAAGSLMNVLNYPGMNHQVKTIGGVLAPECSGLLCDFYRMPRQVFNQQKAELKSIND

SEQ ID NO: 357 - protein, 167 aa, synthetic construct
  REGION 1..167: note = LPG50148.2.58
SNPEFTHEYWMRHALTLARRARDEGEVPVGAVLVLNNQVIGEGWNRAIGLHDPTAHAEIMALRQGGLVLQNYRLIDTTLYSTFEPCVMCSGAMVHSRIGTLVFGVRNSKRGAAGSLMNVLNYPGMNHQVKTIGGVLAPECSGLLCDFYRMPRQVFNQQKDELKSIND

SEQ ID NO: 358 - protein, 167 aa, synthetic construct
  REGION 1..167: note = LPG50148.2.59
SNPEFTHEYWMRHALTLARRARDEGEVPVGAVLVLNNQVIGEGWNRAIGLHDPTAHAEIMALRQGGLVLQNYRLIDTTLYSTFEPCVMCSGAMVHSRIGTLVFGVRNSKRGAAGSLMNVLNYPGMNHQVKTIGGVLAPECSGLLADFYRMPRQVFNQQKAELKSIND

SEQ ID NO: 359 - protein, 167 aa, synthetic construct
  REGION 1..167: note = LPG50148.2.60
SNPEFTHEYWMRHALTLARRARDEGEVPVGAVLVLNNQVIGEGWNRAIGLHDPTAHAEIMALRQGGLVLQNYRLWDTTLYVTFEPCVMCSGAMVHSRIGTLVFGVRNSKRGAAGSLMNVLNYPGMNHQVKTIGGVLAPECSGLLCDFYRMPRQVWNQQKAELKSIND

SEQ ID NO: 360 - protein, 167 aa, synthetic construct
  REGION 1..167: note = LPG50148.2.61
SNPEFTHEYWMRHALTLARRARDEGEVPVGAVLVLNNQVIGEGWNRAIGLHDPTAHAEIMALRQGGLVLQNYRLIDTTLYVTFEPCVMCSGAMVHSRIGTLVFGVRNSKRGAAGSLMNVLNYPGMNHQVKTIGGVLAPECSGLLCDFYRMPRQVWNQQKDELKSIND

SEQ ID NO: 361 - protein, 167 aa, synthetic construct
  REGION 1..167: note = LPG50148.2.62
SNPEFTHEYWMRHALTLARRARDEGEVPVGAVLVLNNQVIGEGWNRAIGLHDPTAHAEIMALRQGGLVLQNYRLIDTTLYVTFEPCVMCSGAMVHSRIGTLVFGVRNSKRGAAGSLMNVLNYPGMNHQVKTIGGVLAPECSGLLADFYRMPRQVWNQQKAELKSIND

SEQ ID NO: 362 - protein, 167 aa, synthetic construct
  REGION 1..167: note = LPG50148.2.63
SNPEFTHEYWMRHALTLARRARDEGEVPVGAVLVLNNQVIGEGWNRAIGLHDPTAHAEIMALRQGGLVLQNYRLWDTTLYVTFEPCVMCSGAMVHSRIGTLVFGVRNSKRGAAGSLMNVLNYPGMNHQVKTIGGVLAPECSGLLCDFYRMPRQVFNQQKDELKSIND

SEQ ID NO: 363 - protein, 167 aa, synthetic construct
  REGION 1..167: note = LPG50148.2.64
SNPEFTHEYWMRHALTLARRARDEGEVPVGAVLVLNNQVIGEGWNRAIGLHDPTAHAEIMALRQGGLVLQNYRLWDTTLYVTFEPCVMCSGAMVHSRIGTLVFGVRNSKRGAAGSLMNVLNYPGMNHQVKTIGGVLAPECSGLLADFYRMPRQVFNQQKAELKSIND

SEQ ID NO: 364 - protein, 167 aa, synthetic construct
  REGION 1..167: note = LPG50148.2.65
SNPEFTHEYWMRHALTLARRARDEGEVPVGAVLVLNNQVIGEGWNRAIGLHDPTAHAEIMALRQGGLVLQNYRLIDTTLYVTFEPCVMCSGAMVHSRIGTLVFGVRNSKRGAAGSLMNVLNYPGMNHQVKTIGGVLAPECSGLLADFYRMPRQVFNQQKDELKSIND

SEQ ID NO: 365 - protein, 167 aa, synthetic construct
  REGION 1..167: note = LPG50148.2.66
SNPEFTHEYWMRHALTLARRARDEGEVPVGAVLVLNNQVIGEGWNRAIGLHDPTAHAEIMALRQGGLVLQNYRLWDTTLYSTFEPCVMCSGAMVHSRIGTLVFGVRNSKRGAAGSLMNVLNYPGMNHQVKTIGGVLAPECSGLLCDFYRMPRQVWNQQKAELKSIND

SEQ ID NO: 366 - protein, 167 aa, synthetic construct
  REGION 1..167: note = LPG50148.2.67
SNPEFTHEYWMRHALTLARRARDEGEVPVGAVLVLNNQVIGEGWNRAIGLHDPTAHAEIMALRQGGLVLQNYRLIDTTLYSTFEPCVMCSGAMVHSRIGTLVFGVRNSKRGAAGSLMNVLNYPGMNHQVKTIGGVLAPECSGLLCDFYRMPRQVWNQQKDELKSIND

SEQ ID NO: 367 - protein, 167 aa, synthetic construct
  REGION 1..167: note = LPG50148.2.68
SNPEFTHEYWMRHALTLARRARDEGEVPVGAVLVLNNQVIGEGWNRAIGLHDPTAHAEIMALRQGGLVLQNYRLIDTTLYSTFEPCVMCSGAMVHSRIGTLVFGVRNSKRGAAGSLMNVLNYPGMNHQVKTIGGVLAPECSGLLADFYRMPRQVWNQQKAELKSIND

SEQ ID NO: 368 - protein, 167 aa, synthetic construct
  REGION 1..167: note = LPG50148.2.69
SNPEFTHEYWMRHALTLARRARDEGEVPVGAVLVLNNQVIGEGWNRAIGLHDPTAHAEIMALRQGGLVLQNYRLWDTTLYSTFEPCVMCSGAMVHSRIGTLVFGVRNSKRGAAGSLMNVLNYPGMNHQVKTIGGVLAPECSGLLCDFYRMPRQVFNQQKDELKSIND

SEQ ID NO: 369 - protein, 167 aa, synthetic construct
  REGION 1..167: note = LPG50148.2.70
SNPEFTHEYWMRHALTLARRARDEGEVPVGAVLVLNNQVIGEGWNRAIGLHDPTAHAEIMALRQGGLVLQNYRLWDTTLYSTFEPCVMCSGAMVHSRIGTLVFGVRNSKRGAAGSLMNVLNYPGMNHQVKTIGGVLAPECSGLLADFYRMPRQVFNQQKAELKSIND

SEQ ID NO: 370 - protein, 167 aa, synthetic construct
  REGION 1..167: note = LPG50148.2.71
SNPEFTHEYWMRHALTLARRARDEGEVPVGAVLVLNNQVIGEGWNRAIGLHDPTAHAEIMALRQGGLVLQNYRLIDTTLYSTFEPCVMCSGAMVHSRIGTLVFGVRNSKRGAAGSLMNVLNYPGMNHQVKTIGGVLAPECSGLLADFYRMPRQVFNQQKDELKSIND

SEQ ID NO: 371 - protein, 167 aa, synthetic construct
  REGION 1..167: note = LPG50148.2.72
SNPEFTHEYWMRHALTLARRARDEGEVPVGAVLVLNNQVIGEGWNRAIGLHDPTAHAEIMALRQGGLVLQNYRLWDTTLYVTFEPCVMCSGAMVHSRIGTLVFGVRNSKRGAAGSLMNVLNYPGMNHQVKTIGGVLAPECSGLLCDFYRMPRQVWNQQKDELKSIND

SEQ ID NO: 372 - protein, 167 aa, synthetic construct
  REGION 1..167: note = LPG50148.2.73
SNPEFTHEYWMRHALTLARRARDEGEVPVGAVLVLNNQVIGEGWNRAIGLHDPTAHAEIMALRQGGLVLQNYRLWDTTLYVTFEPCVMCSGAMVHSRIGTLVFGVRNSKRGAAGSLMNVLNYPGMNHQVKTIGGVLAPECSGLLADFYRMPRQVWNQQKAELKSIND

SEQ ID NO: 373 - protein, 167 aa, synthetic construct
  REGION 1..167: note = LPG50148.2.74
SNPEFTHEYWMRHALTLARRARDEGEVPVGAVLVLNNQVIGEGWNRAIGLHDPTAHAEIMALRQGGLVLQNYRLIDTTLYVTFEPCVMCSGAMVHSRIGTLVFGVRNSKRGAAGSLMNVLNYPGMNHQVKTIGGVLAPECSGLLADFYRMPRQVWNQQKDELKSIND

SEQ ID NO: 374 - protein, 167 aa, synthetic construct
  REGION 1..167: note = LPG50148.2.75
SNPEFTHEYWMRHALTLARRARDEGEVPVGAVLVLNNQVIGEGWNRAIGLHDPTAHAEIMALRQGGLVLQNYRLWDTTLYVTFEPCVMCSGAMVHSRIGTLVFGVRNSKRGAAGSLMNVLNYPGMNHQVKTIGGVLAPECSGLLADFYRMPRQVFNQQKDELKSIND

SEQ ID NO: 375 - protein, 167 aa, synthetic construct
  REGION 1..167: note = LPG50148.2.76
SNPEFTHEYWMRHALTLARRARDEGEVPVGAVLVLNNQVIGEGWNRAIGLHDPTAHAEIMALRQGGLVLQNYRLWDTTLYSTFEPCVMCSGAMVHSRIGTLVFGVRNSKRGAAGSLMNVLNYPGMNHQVKTIGGVLAPECSGLLCDFYRMPRQVWNQQKDELKSIND

SEQ ID NO: 376 - protein, 167 aa, synthetic construct
  REGION 1..167: note = LPG50148.2.77
SNPEFTHEYWMRHALTLARRARDEGEVPVGAVLVLNNQVIGEGWNRAIGLHDPTAHAEIMALRQGGLVLQNYRLWDTTLYSTFEPCVMCSGAMVHSRIGTLVFGVRNSKRGAAGSLMNVLNYPGMNHQVKTIGGVLAPECSGLLADFYRMPRQVWNQQKAELKSIND

SEQ ID NO: 377 - protein, 167 aa, synthetic construct
  REGION 1..167: note = LPG50148.2.78
SNPEFTHEYWMRHALTLARRARDEGEVPVGAVLVLNNQVIGEGWNRAIGLHDPTAHAEIMALRQGGLVLQNYRLIDTTLYSTFEPCVMCSGAMVHSRIGTLVFGVRNSKRGAAGSLMNVLNYPGMNHQVKTIGGVLAPECSGLLADFYRMPRQVWNQQKDELKSIND

SEQ ID NO: 378 - protein, 167 aa, synthetic construct
  REGION 1..167: note = LPG50148.2.79
SNPEFTHEYWMRHALTLARRARDEGEVPVGAVLVLNNQVIGEGWNRAIGLHDPTAHAEIMALRQGGLVLQNYRLWDTTLYSTFEPCVMCSGAMVHSRIGTLVFGVRNSKRGAAGSLMNVLNYPGMNHQVKTIGGVLAPECSGLLADFYRMPRQVFNQQKDELKSIND

SEQ ID NO: 379 - protein, 167 aa, synthetic construct
  REGION 1..167: note = LPG50148.2.80
SNPEFTHEYWMRHALTLARRARDEGEVPVGAVLVLNNQVIGEGWNRAIGLHDPTAHAEIMALRQGGLVLQNYRLWDTTLYVTFEPCVMCSGAMVHSRIGTLVFGVRNSKRGAAGSLMNVLNYPGMNHQVKTIGGVLAPECSGLLADFYRMPRQVWNQQKDELKSIND

SEQ ID NO: 380 - protein, 167 aa, synthetic construct
  REGION 1..167: note = LPG50148.2.81
SNPEFTHEYWMRHALTLARRARDEGEVPVGAVLVLNNQVIGEGWNRAIGLHDPTAHAEIMALRQGGLVLQNYRLWDTTLYSTFEPCVMCSGAMVHSRIGTLVFGVRNSKRGAAGSLMNVLNYPGMNHQVKTIGGVLAPECSGLLADFYRMPRQVWNQQKDELKSIND

SEQ ID NO: 381 - protein, 167 aa, synthetic construct
  REGION 1..167: note = LPG50148.2.82
SNPEFTHEYWMRHALTLARRARDEGEVPVGAVLVLNNQVLGEGWNRAIGLHDPTAHAEIMALRQGGLVLQNYRLIDTTLYVTFEPCVMCSGAMVHSRIGTLVFGVRNSKRGAAGSLMNVLNYPGMNHQVKTIGGVLAPECSGLLCDFYRMPRQVFNQQKAELKSIND

SEQ ID NO: 382 - protein, 167 aa, synthetic construct
  REGION 1..167: note = LPG50148.2.83
SNPEFTHEYWMRHALTLARRARDEGEVPVGAVLVLNNQVIGEGWNRAIGLHDPTAHAEIMALRQGGLVLQNYRLIDTTLYVTFEPCVMCSGAMVHSRIGTLVFGMRNSKRGAAGSLMNVLNYPGMNHQVKTIGGVLAPECSGLLCDFYRMPRQVFNQQKAELKSIND

SEQ ID NO: 383 - protein, 167 aa, synthetic construct
  REGION 1..167: note = LPG50148.2.84
SNPEFTHEYWMRHALTLARRARDEGEVPVGAVLVLNNQVIGEGWNRAIGLHDPTAHAEIMALRQGGLVLQNYRLIDTTLYVTFEPCVMCSGAMVHSRIGTLVFGVRNSKRGAAGSLMNVLVYPGMNHQVKTIGGVLAPECSGLLCDFYRMPRQVFNQQKAELKSIND

SEQ ID NO: 384 - protein, 167 aa, synthetic construct
  REGION 1..167: note = LPG50148.2.85
SNPEFTHEYWMRHALTLARRARDEGEVPVGAVLVLNNQVIGEGWNRAIGLHDPTAHAEIMALRQGGLVLQNYRLIDTTLYVTFEPCVMCSGAMVHSRIGTLVFGVRNSKRGAAGSLMNVLNYPGMNHQVKTIGGVLAPECSGLLMDFYRMPRQVFNQQKAELKSIND

SEQ ID NO: 385 - protein, 167 aa, synthetic construct
  REGION 1..167: note = LPG50148.2.86
SNPEFTHEYWMRHALTLARRARDEGEVPVGAVLVLNNQVIGEGWNRAIGLHDPTAHAEIMALRQGGLVLQNYRLIDTTLYVTFEPCVMCSGAMVHSRIGTLVFGVRNSKRGAAGSLMNVLNYPGMNHQVKTIGGVLAPECSGLLCDFYRMPRQVFNQQQAELKSIND

SEQ ID NO: 386 - protein, 167 aa, synthetic construct
  REGION 1..167: note = LPG50148.2.87
SNPEFTHEYWMRHALTLARRARDEGEVPVGAVLVLNNQVIGEGWNRAIGLHDPTAHAEIMALRQGGLVLQNYRLIDTTLYVTFEPCVMCSGAMVHSRIGTLVFGVRNSKRGAAGSLMNVLNYPGMNHQVKTIGGVLAPECSGLLCDFYRMPRQVFNQQKWELKSIND

SEQ ID NO: 387 - protein, 167 aa, synthetic construct
  REGION 1..167: note = LPG50148.2.88
SNPEFTHEYWMRHALTLARRARDEGEVPVGAVLVLNNQVLGEGWNRAIGLHDPTAHAEIMALRQGGLVLQNYRLIDTTLYVTFEPCVMCSGAMVHSRIGTLVFGMRNSKRGAAGSLMNVLNYPGMNHQVKTIGGVLAPECSGLLCDFYRMPRQVFNQQKAELKSIND

SEQ ID NO: 388 - protein, 167 aa, synthetic construct
  REGION 1..167: note = LPG50148.2.89
SNPEFTHEYWMRHALTLARRARDEGEVPVGAVLVLNNQVLGEGWNRAIGLHDPTAHAEIMALRQGGLVLQNYRLIDTTLYVTFEPCVMCSGAMVHSRIGTLVFGVRNSKRGAAGSLMNVLVYPGMNHQVKTIGGVLAPECSGLLCDFYRMPRQVFNQQKAELKSIND

SEQ ID NO: 389 - protein, 167 aa, synthetic construct
  REGION 1..167: note = LPG50148.2.90
SNPEFTHEYWMRHALTLARRARDEGEVPVGAVLVLNNQVLGEGWNRAIGLHDPTAHAEIMALRQGGLVLQNYRLIDTTLYVTFEPCVMCSGAMVHSRIGTLVFGVRNSKRGAAGSLMNVLNYPGMNHQVKTIGGVLAPECSGLLMDFYRMPRQVFNQQKAELKSIND

SEQ ID NO: 390 - protein, 167 aa, synthetic construct
  REGION 1..167: note = LPG50148.2.91
SNPEFTHEYWMRHALTLARRARDEGEVPVGAVLVLNNQVLGEGWNRAIGLHDPTAHAEIMALRQGGLVLQNYRLIDTTLYVTFEPCVMCSGAMVHSRIGTLVFGVRNSKRGAAGSLMNVLNYPGMNHQVKTIGGVLAPECSGLLCDFYRMPRQVFNQQQAELKSIND

SEQ ID NO: 391 - protein, 167 aa, synthetic construct
  REGION 1..167: note = LPG50148.2.92
SNPEFTHEYWMRHALTLARRARDEGEVPVGAVLVLNNQVLGEGWNRAIGLHDPTAHAEIMALRQGGLVLQNYRLIDTTLYVTFEPCVMCSGAMVHSRIGTLVFGVRNSKRGAAGSLMNVLNYPGMNHQVKTIGGVLAPECSGLLCDFYRMPRQVFNQQKWELKSIND

SEQ ID NO: 392 - protein, 167 aa, synthetic construct
  REGION 1..167: note = LPG50148.2.93
SNPEFTHEYWMRHALTLARRARDEGEVPVGAVLVLNNQVIGEGWNRAIGLHDPTAHAEIMALRQGGLVLQNYRLIDTTLYVTFEPCVMCSGAMVHSRIGTLVFGMRNSKRGAAGSLMNVLVYPGMNHQVKTIGGVLAPECSGLLCDFYRMPRQVFNQQKAELKSIND

SEQ ID NO: 393 - protein, 167 aa, synthetic construct
  REGION 1..167: note = LPG50148.2.94
SNPEFTHEYWMRHALTLARRARDEGEVPVGAVLVLNNQVIGEGWNRAIGLHDPTAHAEIMALRQGGLVLQNYRLIDTTLYVTFEPCVMCSGAMVHSRIGTLVFGMRNSKRGAAGSLMNVLNYPGMNHQVKTIGGVLAPECSGLLMDFYRMPRQVFNQQKAELKSIND

SEQ ID NO: 394 - protein, 167 aa, synthetic construct
  REGION 1..167: note = LPG50148.2.95
SNPEFTHEYWMRHALTLARRARDEGEVPVGAVLVLNNQVIGEGWNRAIGLHDPTAHAEIMALRQGGLVLQNYRLIDTTLYVTFEPCVMCSGAMVHSRIGTLVFGMRNSKRGAAGSLMNVLNYPGMNHQVKTIGGVLAPECSGLLCDFYRMPRQVFNQQQAELKSIND

SEQ ID NO: 395 - protein, 167 aa, synthetic construct
  REGION 1..167: note = LPG50148.2.96
SNPEFTHEYWMRHALTLARRARDEGEVPVGAVLVLNNQVIGEGWNRAIGLHDPTAHAEIMALRQGGLVLQNYRLIDTTLYVTFEPCVMCSGAMVHSRIGTLVFGMRNSKRGAAGSLMNVLNYPGMNHQVKTIGGVLAPECSGLLCDFYRMPRQVFNQQKWELKSIND

SEQ ID NO: 396 - protein, 167 aa, synthetic construct
  REGION 1..167: note = LPG50148.2.97
SNPEFTHEYWMRHALTLARRARDEGEVPVGAVLVLNNQVIGEGWNRAIGLHDPTAHAEIMALRQGGLVLQNYRLIDTTLYVTFEPCVMCSGAMVHSRIGTLVFGVRNSKRGAAGSLMNVLVYPGMNHQVKTIGGVLAPECSGLLMDFYRMPRQVFNQQKAELKSIND

SEQ ID NO: 397 - protein, 167 aa, synthetic construct
  REGION 1..167: note = LPG50148.2.98
SNPEFTHEYWMRHALTLARRARDEGEVPVGAVLVLNNQVIGEGWNRAIGLHDPTAHAEIMALRQGGLVLQNYRLIDTTLYVTFEPCVMCSGAMVHSRIGTLVFGVRNSKRGAAGSLMNVLVYPGMNHQVKTIGGVLAPECSGLLCDFYRMPRQVFNQQQAELKSIND

SEQ ID NO: 398 - protein, 167 aa, synthetic construct
  REGION 1..167: note = LPG50148.2.99
SNPEFTHEYWMRHALTLARRARDEGEVPVGAVLVLNNQVIGEGWNRAIGLHDPTAHAEIMALRQGGLVLQNYRLIDTTLYVTFEPCVMCSGAMVHSRIGTLVFGVRNSKRGAAGSLMNVLVYPGMNHQVKTIGGVLAPECSGLLCDFYRMPRQVFNQQKWELKSIND

SEQ ID NO: 399 - protein, 167 aa, synthetic construct
  REGION 1..167: note = LPG50148.2.100
SNPEFTHEYWMRHALTLARRARDEGEVPVGAVLVLNNQVIGEGWNRAIGLHDPTAHAEIMALRQGGLVLQNYRLIDTTLYVTFEPCVMCSGAMVHSRIGTLVFGVRNSKRGAAGSLMNVLNYPGMNHQVKTIGGVLAPECSGLLMDFYRMPRQVFNQQQAELKSIND

SEQ ID NO: 400 - protein, 167 aa, synthetic construct
  REGION 1..167: note = LPG50148.2.101
SNPEFTHEYWMRHALTLARRARDEGEVPVGAVLVLNNQVIGEGWNRAIGLHDPTAHAEIMALRQGGLVLQNYRLIDTTLYVTFEPCVMCSGAMVHSRIGTLVFGVRNSKRGAAGSLMNVLNYPGMNHQVKTIGGVLAPECSGLLMDFYRMPRQVFNQQKWELKSIND

SEQ ID NO: 401 - protein, 167 aa, synthetic construct
  REGION 1..167: note = LPG50148.2.102
SNPEFTHEYWMRHALTLARRARDEGEVPVGAVLVLNNQVIGEGWNRAIGLHDPTAHAEIMALRQGGLVLQNYRLIDTTLYVTFEPCVMCSGAMVHSRIGTLVFGVRNSKRGAAGSLMNVLNYPGMNHQVKTIGGVLAPECSGLLCDFYRMPRQVFNQQQWELKSIND

SEQ ID NO: 402 - protein, 167 aa, synthetic construct
  REGION 1..167: note = LPG50148.2.103
SNPEFTHEYWMRHALTLARRARDEGEVPVGAVLVLNNQVIGEGWNRAIGLHDPTAHAEIMALRQGGLVLQNYRLIDTTLYSTFEPCVMCSGAMVHSRIGTLVFGVRNSKRGAAGSLMNVLNYPGMNHQVKTIGGVLAPECSGLLMDFYRMPRQVFNQQKWELKSIND

SEQ ID NO: 403 - protein, 167 aa, synthetic construct
  REGION 1..167: note = LPG50148.2.104
SNPEFTHEYWMRHALTLARRARDEGEVPVGAVLVLNNQVIGEGWNRAIGLHDPTAHAEIMALRQGGLVLQNYRLIDTTLYSTFEPCVMCSGAMVHSRIGTLVFGVRNSKRGAAGSLMNVLVYPGMNHQVKTIGGVLAPECSGLLCDFYRMPRQVFNQQQAELKSIND

SEQ ID NO: 404 - protein, 167 aa, synthetic construct
  REGION 1..167: note = LPG50148.2.105
SNPEFTHEYWMRHALTLARRARDEGEVPVGAVLVLNNQVIGEGWNRAIGLHDPTAHAEIMALRQGGLALQNYRLIDTTLYSTFEPCVMCSGAMVHSRIGTLVFGVRNSKRGAAGSLMNVLNYPGMNHQVKTIGGVLAPECSGLLCDFYRMPRQVFNQQKAELKSIND

SEQ ID NO: 405 - protein, 167 aa, synthetic construct
  REGION 1..167: note = LPG50148.2.106
SNPEFTHEYWMRHALTLARRARDEGEVPVGAVLVLNNQVIGEGWNRAIGLHDPTAHAEIMALRQGGLVLQNYRLIGTTLYSTFEPCVMCSGAMVHSRIGTLVFGVRNSKRGAAGSLMNVLNYPGMNHQVKTIGGVLAPECSGLLCDFYRMPRQVFNQQKAELKSIND

SEQ ID NO: 406 - protein, 167 aa, synthetic construct
  REGION 1..167: note = LPG50148.2.107
SNPEFTHEYWMRHALTLARRARDEGEVPVGAVLVLNNQVIGEGWNRAIGLHDPTAHAEIMALRQGGLVLQNYRLIDTTLYSTFEPCVMCSGAMVHSRIGTLVFGVRNSKRGAAGSLLNVLNYPGMNHQVKTIGGVLAPECSGLLCDFYRMPRQVFNQQKAELKSIND

SEQ ID NO: 407 - protein, 167 aa, synthetic construct
  REGION 1..167: note = LPG50148.2.108
SNPEFTHEYWMRHALTLARRARDEGEVPVGAVLVLNNQVIGEGWNRAIGLHDPTAHAEIMALRQGGLALQNYRLIGTTLYVTFEPCVMCSGAMVHSRIGTLVFGVRNSKRGAAGSLMNVLNYPGMNHQVKTIGGVLAPECSGLLCDFYRMPRQVFNQQKAELKSIND

SEQ ID NO: 408 - protein, 167 aa, synthetic construct
  REGION 1..167: note = LPG50148.2.109
SNPEFTHEYWMRHALTLARRARDEGEVPVGAVLVLNNQVIGEGWNRAIGLHDPTAHAEIMALRQGGLALQNYRLIDTTLYVTFEPCVMCSGAMVHSRIGTLVFGVRNSKRGAAGSLLNVLNYPGMNHQVKTIGGVLAPECSGLLCDFYRMPRQVFNQQKAELKSIND

SEQ ID NO: 409 - protein, 167 aa, synthetic construct
  REGION 1..167: note = LPG50148.2.110
SNPEFTHEYWMRHALTLARRARDEGEVPVGAVLVLNNQVIGEGWNRAIGLHDPTAHAEIMALRQGGLVLQNYRLIGTTLYVTFEPCVMCSGAMVHSRIGTLVFGVRNSKRGAAGSLLNVLNYPGMNHQVKTIGGVLAPECSGLLCDFYRMPRQVFNQQKAELKSIND

SEQ ID NO: 410 - protein, 167 aa, synthetic construct
  REGION 1..167: note = LPG50148.2.111
SNPEFTHEYWMRHALTLARRARDEGEVPVGAVLVLNNQVIGEGWNRAIGLHDPTAHAEIMALRQGGLALQNYRLIGTTLYSTFEPCVMCSGAMVHSRIGTLVFGVRNSKRGAAGSLMNVLNYPGMNHQVKTIGGVLAPECSGLLCDFYRMPRQVFNQQKAELKSIND

SEQ ID NO: 411 - protein, 167 aa, synthetic construct
  REGION 1..167: note = LPG50148.2.112
SNPEFTHEYWMRHALTLARRARDEGEVPVGAVLVLNNQVIGEGWNRAIGLHDPTAHAEIMALRQGGLALQNYRLIDTTLYSTFEPCVMCSGAMVHSRIGTLVFGVRNSKRGAAGSLLNVLNYPGMNHQVKTIGGVLAPECSGLLCDFYRMPRQVFNQQKAELKSIND

SEQ ID NO: 412 - protein, 167 aa, synthetic construct
  REGION 1..167: note = LPG50148.2.113
SNPEFTHEYWMRHALTLARRARDEGEVPVGAVLVLNNQVIGEGWNRAIGLHDPTAHAEIMALRQGGLVLQNYRLIGTTLYSTFEPCVMCSGAMVHSRIGTLVFGVRNSKRGAAGSLLNVLNYPGMNHQVKTIGGVLAPECSGLLCDFYRMPRQVFNQQKAELKSIND

SEQ ID NO: 413 - protein, 167 aa, synthetic construct
  REGION 1..167: note = LPG50148.2.114
SNPEFTHEYWMRHALTLARRARDEGEVPVGAVLVLNNQVIGEGWNRAIGLHDPTAHAEIMALRQGGLALQNYRLIGTTLYVTFEPCVMCSGAMVHSRIGTLVFGVRNSKRGAAGSLLNVLNYPGMNHQVKTIGGVLAPECSGLLCDFYRMPRQVFNQQKAELKSIND

SEQ ID NO: 414 - protein, 167 aa, synthetic construct
  REGION 1..167: note = LPG50148.2.115
SNPEFTHEYWMRHALTLARRARDEGEVPVGAVLVLNNQVIGEGWNRAIGLHDPTAHAEIMALRQGGLALQNYRLIGTTLYSTFEPCVMCSGAMVHSRIGTLVFGVRNSKRGAAGSLLNVLNYPGMNHQVKTIGGVLAPECSGLLCDFYRMPRQVFNQQKAELKSIND

SEQ ID NO: 415 - protein, 1368 aa, Streptococcus pyogenes
  REGION 1..1368: note = Streptococcus pyogenes Cas9
MDKKYSIGLDIGTNSVGWAVITDDYKVPSKKLKGLGNTDRHGIKKNLIGALLFDSGETAEATRLKRTARRRYTRRKNRICYLQEIFSNEMAKVDDSFFHRLEESFLVEEDKKHERHPIFGNIVDEVAYHEKYPTIYHLRKKLADSTDKVDLRLIYLALAHMIKFRGHFLIEGDLNPDNSDVDKLFIQLVQTYNQLFEENPINASRVDAKAILSARLSKSRRLENLIAQLPGEKKNGLFGNLIALSLGLTPNFKSNFDLAEDAKLQLSKDTYDDDLDNLLAQIGDQYADLFLAAKNLSDATLLSDILRVNSEITKAPLSASMIKRYDEHHQDLTLLKALVRQQLPEKYKEIFFDQSKNGYAGYIDGGASQEEFYKFIKPILEKMDGTEELLAKLNREDLLRKQRTFDNGSIPYQIHLGELHAILRRQEDFYPFLKDNREKIEKILTFRIPYYVGPLARGNSRFAWMTRKSEETITPWNFEEVVDKGASAQSFIERMTNFDKNLPNEKVLPKHSLLYEYFTVYNELTKVKYVTEGMRKPAFLSGEQKKAIVDLLFKTNRKVTVKQLKEDYFKKIECFDSVEISGVEDRFNASLGTYHDLLKIIKDKDFLDNEENEDILEDIVLTLTLFEDREMIEERLKTYAHLFDDKVMKQLKRRRYTGWGRLSRKLINGIRDKQSGKTILDFLKSDGFANRNFMQLIHDDSLTFKEDIQKAQVSGQGDSLHEHIANLAGSPAIKKGILQTVKVVDELVKVMGRHKPENIVIEMARENQTTQKGQKNSRERMKRIEEGIKELGSDILKEYPVENTQLQNEKLYLYYLQNGRDMYVDQELDINRLSDYDVDHIVPQSFLKDDSIDNKVLTRSDKNRGKSDNVPSEEVVKKMKNYWRQLLNAKLITQRKFDNLTKAERGGLSELDKVGFIKRQLVETRQITKHVAQILDSRMNTKYDENDKLIREVRVITLKSKLVSDFRKDFQFYKVREINNYHHAHDAYLNAVVGTALIKKYPKLESEFVYGDYKVYDVRKMIAKSEQEIGKATAKYFFYSNIMNFFKTEITLANGEIRKRPLIETNGETGEIVWDKGRDFATVRKVLSMPQVNIVKKTEVQTGGFSKESILPKRNSDKLIARKKDWDPKKYGGFDSPTVAYSVLVVAKVEKGKSKKLKSVKELLGITIMERSSFEKDPIDFLEAKGYKEVRKDLIIKLPKYSLFELENGRKRMLASAGELQKGNELALPSKYVNFLYLASHYEKLKGSPEDNEQKQLFVEQHKHYLDEIIEQISEFSKRVILADANLDKVLSAYNKHRDKPIREQAENIIHLFTLTNLGAPAAFKYFDTTIDRKRYTSTKEVLDATLIHQSITGLYETRIDLSQLGGD

SEQ ID NO: 416 - RNA, 21 nt, synthetic construct
  source 1..21: mol_type = other RNA
  misc_feature 1..21: note = APG07433.1 crRNA repeat
gtcatagttccattaaagcca

SEQ ID NO: 417 - RNA, 85 nt, synthetic construct
  source 1..85: mol_type = other RNA
  misc_feature 1..85: note = APG07433.1 tracrRNA
tggctttgatgtttctatgataagggtttcgacccgtggcgtcggggatcgcctgcccattgaaatgggcttctccccatttatt

SEQ ID NO: 418 - skipped

SEQ ID NO: 419 - RNA, 19 nt, synthetic construct
  source 1..19: mol_type = other RNA
  misc_feature 1..19: note = APG05586 crRNA repeat
gttattgtactctcaataa

SEQ ID NO: 420 - RNA, 67 nt, synthetic construct
  source 1..67: mol_type = other RNA
  misc_feature 1..67: note = APG05586 tracrRNA
ttattgagaatctacaataataaggcatcttgccgaatttaccgccctacatatgtagggcggtttt

SEQ ID NO: 421 - skipped

SEQ ID NO: 422 - RNA, 17 nt, synthetic construct
  source 1..17: mol_type = other RNA
  misc_feature 1..17: note = APG01604 crRNA repeat
gttttagtactctgtaa

SEQ ID NO: 423 - RNA, 64 nt, synthetic construct
  source 1..64: mol_type = other RNA
  misc_feature 1..64: note = APG01604 tracrRNA
ttacagaatctactaaaacaagactatatatcgtgtttatcccatcaatttattgatgggattt

SEQ ID NO: 424 - skipped

SEQ ID NO: 425 - RNA, 24 nt, synthetic construct
  source 1..24: mol_type = other RNA
  misc_feature 1..24: note = LPG10145 crRNA repeat
gtttttgtactctcaaggaatcag

SEQ ID NO: 426 - RNA, 85 nt, synthetic construct; identical to SEQ ID NO: 180
  source 1..85: mol_type = other RNA
  misc_feature 1..85: note = LPG10145 tracrRNA

SEQ ID NO: 427 - skipped

SEQ ID NO: 428 - protein, 1120 aa, synthetic construct
  REGION 1..1120: note = nAPG07433.1_HNHreplacement_LPG50148 (LPG20001)
MRELDYRIGLAIGTNSIGWGVIELSWNKDRERYEKVRIVDQGVRMFDRAEMPKTGASLAEPRRIARSSRRRLNRKSQRKKNIRNLLVQHGVITQEELDSLYPLSKKSMDIWGIRLDGLDRLLNHFEWARLLIHLAQRRGFKSNRKSELKDTETGKVLSSIQLNEKRLSLYRTVGEMWMKDPDFSKYDRKRNSPNEYVFSVSRAELEKEIVTLFAAQRRFQSPYASKDLQETYLQIWTHQLPFASGNAILNKVGYCSLLKGKERRIPKATYTFQYFSALDQVNRTRLGPDFQPFTKEQREIILNNMFQRTDYYKKKTIPEVTYYDIRKWLELDETIQFKGLNYDPNEELKKIEKKPFINLKAFYEINKVVANYSERTNETFSTLDYDGIGYALTVYKTDKDIRSYLKSSHNLPKRCYDDQLIEELLSLSYTKFGHLSLKAINHVLSIMQKGNTYKEAVDQLGYDTSGLKKEKRSKFLPPISDEITNPIVKRALTQARKVVNAIIRRHGSPHSVHIELARELSKNHDERTKIVSAQDENYKKNKGAISILSEHGSNPEFTHEYWMRHALTLARRARDEGEVPVGAVLVLNNQVIGEGWNRAIGLHDPTAHAEIMALRQGGLVLQNYRLIDTTLYVTFEPCVMCSGAMVHSRIGTLVFGVRNSKRGAAGSLMNVLNYPGMNHQVKTIGGVLAPECSGLLCDFYRMPRQVFNQQKAELKSINDAYLPRESELIKERHLNDTRYASTFLKNFIEQNLQFKEAEDNPRKRRVQTVNGVITAHFRKRWGLEKDRQETYLHHAMDAIIVACTDHHMVTRVTEYYQIKESNKSVKKPYFPMPWEGFRDELLSHLASQPIAKKISEELKAGYQSLDYIFVSRMPKRSITGAAHKQTIMRKGGIDKKGKTIIIERLHLKDIKFDENGDFKMVGKEQDMATYEAIKQRYLEHGKNSKKAFETPLYKPSKKGTGNLIKRVKVEGQAKSFVREVNGGVAQNGDLVRVDLFEKDDKYYMVPIYVPDTVCSELPKKVVASSKGYEQWLTLDNSFTFKFSLYPYDLVRLVKGDEDRFLYFGTLDIDSDRLNFKDVNKPSKKNEYRYSLKTIEDLEKYEVGVLGDLRLVRKETRRNFH

SEQ ID NO: 429 - protein, 1238 aa, synthetic construct
  REGION 1..1238: note = nAPG07433.1_inlaidS772LPG50148 (Nolinker/ LPG20041)
MRELDYRIGLAIGTNSIGWGVIELSWNKDRERYEKVRIVDQGVRMFDRAEMPKTGASLAEPRRIARSSRRRLNRKSQRKKNIRNLLVQHGVITQEELDSLYPLSKKSMDIWGIRLDGLDRLLNHFEWARLLIHLAQRRGFKSNRKSELKDTETGKVLSSIQLNEKRLSLYRTVGEMWMKDPDFSKYDRKRNSPNEYVFSVSRAELEKEIVTLFAAQRRFQSPYASKDLQETYLQIWTHQLPFASGNAILNKVGYCSLLKGKERRIPKATYTFQYFSALDQVNRTRLGPDFQPFTKEQREIILNNMFQRTDYYKKKTIPEVTYYDIRKWLELDETIQFKGLNYDPNEELKKIEKKPFINLKAFYEINKVVANYSERTNETFSTLDYDGIGYALTVYKTDKDIRSYLKSSHNLPKRCYDDQLIEELLSLSYTKFGHLSLKAINHVLSIMQKGNTYKEAVDQLGYDTSGLKKEKRSKFLPPISDEITNPIVKRALTQARKVVNAIIRRHGSPHSVHIELARELSKNHDERTKIVSAQDENYKKNKGAISILSEHGILNPTGYDIVRYKLWKEQGERCAYSLKEIPADTFFNELKKERNGAPILEVDHILPYSQSFIDSYHNKVLVYSDENRKKGNRIPYTYFLETNKDWEAFERYVRSNKFFSKKKREYLLKRAYLPRESELIKERHLNDTRYASTFLKNFIEQNLQFKEAEDNPRKRRVQTVNGVITAHFRKRWGLEKDRQETYLHHAMDAIIVACTDHHMVTRVTEYYQIKESSNPEFTHEYWMRHALTLARRARDEGEVPVGAVLVLNNQVIGEGWNRAIGLHDPTAHAEIMALRQGGLVLQNYRLIDTTLYVTFEPCVMCSGAMVHSRIGTLVFGVRNSKRGAAGSLMNVLNYPGMNHQVKTIGGVLAPECSGLLCDFYRMPRQVFNQQKAELKSINDNKSVKKPYFPMPWEGFRDELLSHLASQPIAKKISEELKAGYQSLDYIFVSRMPKRSITGAAHKQTIMRKGGIDKKGKTIIIERLHLKDIKFDENGDFKMVGKEQDMATYEAIKQRYLEHGKNSKKAFETPLYKPSKKGTGNLIKRVKVEGQAKSFVREVNGGVAQNGDLVRVDLFEKDDKYYMVPIYVPDTVCSELPKKVVASSKGYEQWLTLDNSFTFKFSLYPYDLVRLVKGDEDRFLYFGTLDIDSDRLNFKDVNKPSKKNEYRYSLKTIEDLEKYEVGVLGDLRLVRKETRRNFH

SEQ ID NO: 430 - protein, 7 aa, synthetic construct
  REGION 1..7: note = SV40 NLS
PKKKRKV

SEQ ID NO: 431 - protein, 16 aa, synthetic construct
  REGION 1..16: note = Nucleoplasmin NLS
KRPAATKKAGQAKKKK

SEQ ID NO: 432 - RNA, 19 nt, synthetic construct
  source 1..19: mol_type = other RNA
  misc_feature 1..19: note = APG05083.1 crRNA repeat
gtcatagttccattattgc

SEQ ID NO: 433 - RNA, 84 nt, synthetic construct
  source 1..84: mol_type = other RNA
  misc_feature 1..84: note = APG05083.1 tracrRNA
gctttgatgtttctatgataagggcttaggcccgtggcgttggggatcgcctgcccattttaatgggcttctccccatctattt

SEQ ID NO: 434 - skipped

SEQ ID NO: 435 - protein, 1071 aa, Bacillus sp.; identical to SEQ ID NO: 59
  REGION 1..1071: note = APG07513.1

SEQ ID NO: 436 - RNA, 27 nt, synthetic construct
  source 1..27: mol_type = other RNA
  misc_feature 1..27: note = APG07513.1 crRNA repeat
gtcatagttccattaaagccattgctg

SEQ ID NO: 437 - RNA, 93 nt, synthetic construct
  source 1..93: mol_type = other RNA
  misc_feature 1..93: note = APG07513.1 tracrRNA
acagcaatggctttgatgtttctatgataagggcttcggcccgtggcgttggggatcgcctgcccattttaatgggcttctccccatctattt

SEQ ID NO: 438 - skipped

SEQ ID NO: 439 - RNA, 21 nt, synthetic construct
  source 1..21: mol_type = other RNA
  misc_feature 1..21: note = APG08290.1 crRNA repeat
gtcatagttccatgaaagcca

SEQ ID NO: 440 - RNA, 85 nt, synthetic construct
  source 1..85: mol_type = other RNA
  misc_feature 1..85: note = APG08290.1 tracrRNA
tggctttgatgtttctatgataagggtttcggcccgtggcgtcggggatcgcctgcccattccgatgggcttctccccatttatt

SEQ ID NO: 441 - skipped

SEQ ID NO: 442 - RNA, 16 nt, synthetic construct
  source 1..16: mol_type = other RNA
  misc_feature 1..16: note = APG05459.1 crRNA repeat
gttttagagtcatgtt

SEQ ID NO: 443 - RNA, 74 nt, synthetic construct
  source 1..74: mol_type = other RNA
  misc_feature 1..74: note = APG05459.1 tracrRNA
aacatagcaagttaaaataaggttttaaccgtaatcaactgtaaagtggcgctgtttcggcgctttttttgttt

SEQ ID NO: 444 - skipped

SEQ ID NO: 445 - RNA, 16 nt, synthetic construct
  source 1..16: mol_type = other RNA
  misc_feature 1..16: note = APG04583.1 crRNA repeat
gttgtgagttcctttc

SEQ ID NO: 446 - RNA, 78 nt, synthetic construct
  source 1..78: mol_type = other RNA
  misc_feature 1..78: note = APG04583.1 tracrRNA
gaaaggaactcacaataaggattattccgttgtgaaaacatttagcgcctcgactatcttcggggcttttttattttt

SEQ ID NO: 447 - skipped

SEQ ID NO: 448 - RNA, 18 nt, synthetic construct
  source 1..18: mol_type = other RNA
  misc_feature 1..18: note = APG01688.1 crRNA repeat
gttgtgaattgctttcaa

SEQ ID NO: 449 - RNA, 75 nt, synthetic construct
  source 1..75: mol_type = other RNA
  misc_feature 1..75: note = APG01688.1 tracrRNA
ttgaaaagcaattcacaataaggattattccgttgtgaaaacattcaaggcggggcaactcgtcttttttctttt

SEQ ID NO: 450 - skipped

SEQ ID NO: 451 - RNA, 16 nt, synthetic construct
  source 1..16: mol_type = other RNA
  misc_feature 1..16: note = APG00969 crRNA repeat
gttttagtactctgtg

SEQ ID NO: 452 - RNA, 73 nt, synthetic construct
  source 1..73: mol_type = other RNA
  misc_feature 1..73: note = APG00969 tracrRNA
cacagaatctactaaaataaggcataatgccgtatttaatcccatcataattctgatgggattttttatattt

SEQ ID NO: 453 - skipped

SEQ ID NO: 454 - RNA, 31 nt, synthetic construct
  source 1..31: mol_type = other RNA
  misc_feature 1..31: note = APG03128 crRNA repeat
ggttgcggctggaccgcgttttctgatctgc

SEQ ID NO: 455 - RNA, 79 nt, synthetic construct
  source 1..79: mol_type = other RNA
  misc_feature 1..79: note = APG03128 tracrRNA
gcaaatcagaaaacgcggtctggccgttaacaagcctcgaccagcaccagataaggcggtccctccgggggccgttttt

SEQ ID NO: 456 - skipped

SEQ ID NO: 457 - RNA, 22 nt, synthetic construct
  source 1..22: mol_type = other RNA
  misc_feature 1..22: note = APG09748 crRNA repeat
tggaaagcttcgaggttagcac

SEQ ID NO: 458 - RNA, 95 nt, synthetic construct
  source 1..95: mol_type = other RNA
  misc_feature 1..95: note = APG09748 tracrRNA
cgacggttagaggccgtatgtcgatttgctttaatttcgtgcgtgtgcattgtcgtcctccattacagggcggctaccacgaatagccacgaagt

SEQ ID NO: 459 - skipped

SEQ ID NO: 460 - RNA, 20 nt, synthetic construct
  source 1..20: mol_type = other RNA
  misc_feature 1..20: note = APG00771 crRNA repeat
gttgtgaattgctttcaaaa

SEQ ID NO: 461 - RNA, 76 nt, synthetic construct
  source 1..76: mol_type = other RNA
  misc_feature 1..76: note = APG00771 tracrRNA
ttttgaaagcaattcacaataaggattattccgttgtgaaaacattcaaggcggggcaactcgccttttttcgttt

SEQ ID NO: 462 - skipped

SEQ ID NO: 463 - RNA, 36 nt, synthetic construct
  source 1..36: mol_type = other RNA
  misc_feature 1..36: note = APG02789 crRNA repeat
gcctgaatacttagcagaaataatgatgattggcac

SEQ ID NO: 464 - RNA, 100 nt, synthetic construct
  source 1..100: mol_type = other RNA
  misc_feature 1..100: note = APG02789 tracrRNA
ataataaaggtgacctatagggtcaatgaatctgtgcgtgtgccataagtaattaaaaattacccaccacaggattatcttatttctgctaagtgtttag

SEQ ID NO: 465 - skipped

SEQ ID NO: 466 - RNA, 22 nt, synthetic construct
  source 1..22: mol_type = other RNA
  misc_feature 1..22: note = APG09106 crRNA repeat
tggaaagcttcgaggttagcac

SEQ ID NO: 467 - RNA, 105 nt, synthetic construct
  source 1..105: mol_type = other RNA
  misc_feature 1..105: note = APG09106 tracrRNA
cgacggttagaggccgtatgtcgatttgctttaatttcgtgcgtgtgcattgtcgtcctccattacagggcggctaccacgaatagtcacgaagttccactgagt

SEQ ID NO: 468 - skipped

SEQ ID NO: 469 - RNA, 34 nt, synthetic construct
  source 1..34: mol_type = other RNA
  misc_feature 1..34: note = APG05733.1 crRNA repeat
gtcatagttccattaaagccattgctgttttatg

SEQ ID NO: 470 - RNA, 148 nt, synthetic construct
  source 1..148: mol_type = other RNA
  misc_feature 1..148: note = APG05733.1 tracrRNA
catgatacagcaatggctttgatgtttctatgataagggcttcggcccgtggcgttggggatcgcctgcccattttaatgggcttctccccatctatttaatgagaaatttacaaccttggctattcttaaatagctaaggttttttt

SEQ ID NO: 471 - skipped

SEQ ID NO: 472 - RNA, 24 nt, synthetic construct
  source 1..24: mol_type = other RNA
  misc_feature 1..24: note = APG06207.1 crRNA repeat
gttgtgaaatgctttcaaaactta

SEQ ID NO: 473 - RNA, 78 nt, synthetic construct
  source 1..78: mol_type = other RNA
  misc_feature 1..78: note = APG06207.1 tracrRNA
ataaattttgaaagcacttcacaataaggattattccgttgtgaaaacattcaaggcggggcaactcgcctttttttt

SEQ ID NO: 474 - skipped

SEQ ID NO: 475 - RNA, 18 nt, synthetic construct
  source 1..18: mol_type = other RNA
  misc_feature 1..18: note = APG01647.1 crRNA repeat
gttgtgaattgctttcat

SEQ ID NO: 476 - RNA, 72 nt, synthetic construct
  source 1..72: mol_type = other RNA
  misc_feature 1..72: note = APG01647.1 tracrRNA
atgaaagcaattcacaataaggattatttccgttgtgtaaacatttagcgcctcgtctatctacggggcatt

SEQ ID NO: 477 - skipped

SEQ ID NO: 478 - RNA, 29 nt, synthetic construct
  source 1..29: mol_type = other RNA
  misc_feature 1..29: note = APG08032.1 crRNA repeat
gttgtgaattgctttcaaaaattattatc

SEQ ID NO: 479 - RNA, 83 nt, synthetic construct
  source 1..83: mol_type = other RNA
  misc_feature 1..83: note = APG08032.1 tracrRNA
taataattttgaaagcaattcacaataaggattattccgttgtgaaaacattcaaggcggggcaactcgccttttttcgtttt

SEQ ID NO: 480 - skipped

SEQ ID NO: 481 - RNA, 27 nt, synthetic construct
  source 1..27: mol_type = other RNA
  misc_feature 1..27: note = APG05712.1 crRNA repeat
gttgcggttggcctgcgatttctgaac

SEQ ID NO: 482 - RNA, 81 nt, synthetic construct
  source 1..81: mol_type = other RNA
  misc_feature 1..81: note = APG05712.1 tracrRNA
gttcagaaatcgcagtccagccgttaacaagctgagatatgcaccaaataaggcgctcgcttcggcgggcgctttttcgtt

SEQ ID NO: 483 - skipped

SEQ ID NO: 484 - RNA, 28 nt, synthetic construct
  source 1..28: mol_type = other RNA
  misc_feature 1..28: note = APG01658.1 crRNA repeat
gttttagtactctgtaattttaggtatg

SEQ ID NO: 485 - RNA, 85 nt, synthetic construct
  source 1..85: mol_type = other RNA
  misc_feature 1..85: note = APG01658.1 tracrRNA
tcatacctaaaattacagaatctactgaaacaagactatatgtcgtgtttatcccactaatttattagtgggatttttttgtttt

SEQ ID NO: 486 - skipped

SEQ ID NO: 487 - RNA, 20 nt, synthetic construct
  source 1..20: mol_type = other RNA
  misc_feature 1..20: note = APG06498.1 crRNA repeat
gtcatagttccattaaagcc

SEQ ID NO: 488 - RNA, 84 nt, synthetic construct
  source 1..84: mol_type = other RNA
  misc_feature 1..84: note = APG06498.1 tracrRNA
ggctttgatgtttctatgataagggtttcggcccgtggcgtcggggatcgcctgcccattccgatgggcttctccccatttatt

SEQ ID NO: 489 - skipped

SEQ ID NO: 490 - RNA, 22 nt, synthetic construct
  source 1..22: mol_type = other RNA
  misc_feature 1..22: note = APG09106.1 crRNA repeat
tggaaagcttcgaggttagcac

SEQ ID NO: 491 - RNA, 105 nt, synthetic construct; identical to SEQ ID NO: 467
  source 1..105: mol_type = other RNA
  misc_feature 1..105: note = APG09106.1 tracrRNA

SEQ ID NO: 492 - skipped

SEQ ID NO: 493 - RNA, 19 nt, synthetic construct
  source 1..19: mol_type = other RNA
  misc_feature 1..19: note = APG09882.1 crRNA repeat
gtttttgtactctcaataa

SEQ ID NO: 494 - RNA, 73 nt, synthetic construct
  source 1..73: mol_type = other RNA
  misc_feature 1..73: note = APG09882.1 tracrRNA
ttattgagaatctacaaaaataaggcattttgccgaatttaccgccctacatatgtagggcggtttttttatt

SEQ ID NO: 495 - skipped

SEQ ID NO: 496 - RNA, 16 nt, synthetic construct
  source 1..16: mol_type = other RNA
  misc_feature 1..16: note = APG02675.1 crRNA repeat
gttgtgaattgctttc

SEQ ID NO: 497 - RNA, 72 nt, synthetic construct
  source 1..72: mol_type = other RNA
  misc_feature 1..72: note = APG02675.1 tracrRNA
gaaagcaattcacaataaggattatttccgttgtgtaaacatttagcgcctcgtctatctacggggcatttt

SEQ ID NO: 498 - skipped

SEQ ID NO: 499 - RNA, 19 nt, synthetic construct
  source 1..19: mol_type = other RNA
  misc_feature 1..19: note = APG01405.1 crRNA repeat
gttgtgaattgctttcaaa

SEQ ID NO: 500 - RNA, 75 nt, synthetic construct
  source 1..75: mol_type = other RNA
  misc_feature 1..75: note = APG01405.1 tracrRNA
tttgaaaagcaattcacaataaggattattccgttgtgaaaacattcaaggcggggcaactcgccttttttcgtt

SEQ ID NO: 501 - skipped

SEQ ID NO: 502 - RNA, 20 nt, synthetic construct
  source 1..20: mol_type = other RNA
  misc_feature 1..20: note = APG06250.1 crRNA repeat
gttgtgaattgctttcaaaa

SEQ ID NO: 503 - RNA, 79 nt, synthetic construct
  source 1..79: mol_type = other RNA
  misc_feature 1..79: note = APG06250.1 tracrRNA
ttttgaaagcaattcacaataaggattattccgttgtgaaaacatttagagcctcgactaccttcggggcatttttatt

SEQ ID NO: 504 - skipped

SEQ ID NO: 505 - RNA, 24 nt, synthetic construct
  source 1..24: mol_type = other RNA
  misc_feature 1..24: note = APG06877.1 crRNA repeat
gtcatagttccattaaagccattg

SEQ ID NO: 506 - RNA, 138 nt, synthetic construct
  source 1..138: mol_type = other RNA
  misc_feature 1..138: note = APG06877.1 tracrRNA
caatggctttgatgtttctatgataagggcttcggcccgtggcgttggggatcgcctgcccattttaatgggcttctccccatctatttaatgagaattttacaaccttggctattcttaaatagctaaggttttttt

SEQ ID NO: 507 - skipped

SEQ ID NO: 508 - RNA, 29 nt, synthetic construct
  source 1..29: mol_type = other RNA
  misc_feature 1..29: note = APG09053.1 crRNA repeat
gttgcggctggaccgcgttttctgatctg

SEQ ID NO: 509 - RNA, 78 nt, synthetic construct
  source 1..78: mol_type = other RNA
  misc_feature 1..78: note = APG09053.1 tracrRNA
cagatcagaaaacgcggtctggccgttaacaagctagaagcaccaaataaggccgttccttcgggagcggctttttct

SEQ ID NO: 510 - skipped

SEQ ID NO: 511 - RNA, 21 nt, synthetic construct
  source 1..21: mol_type = other RNA
  misc_feature 1..21: note = APG04293.1 crRNA repeat
gttgtgaattgctttcaaaca

SEQ ID NO: 512 - RNA, 105 nt, synthetic construct
  source 1..105: mol_type = other RNA
  misc_feature 1..105: note = APG04293.1 tracrRNA
tgaaagcaattcacaataaggattattccgttgtgaaaacatctagtcctcgactaatttcggggaataaagccttaactctgttaaggctttttttagtttttt

SEQ ID NO: 513 - skipped

SEQ ID NO: 514 - RNA, 16 nt, synthetic construct
  source 1..16: mol_type = other RNA
  misc_feature 1..16: note = APG01308.1 crRNA repeat
gttgtgaattgctttc

SEQ ID NO: 515 - RNA, 73 nt, synthetic construct
  source 1..73: mol_type = other RNA
  misc_feature 1..73: note = APG01308.1 tracrRNA
gaaagcaattcacaataaggattattccgttgtgaaaacatttagcgcctcgactatcttcggggcatttttt

SEQ ID NO: 516 - skipped

SEQ ID NO: 517 - RNA, 23 nt, synthetic construct
  source 1..23: mol_type = other RNA
  misc_feature 1..23: note = APG06646.1 crRNA repeat
gccataattcctctgtaaaactt

SEQ ID NO: 518 - RNA, 112 nt, synthetic construct
  source 1..112: mol_type = other RNA
  misc_feature 1..112: note = APG06646.1 tracrRNA
aaggtttatagagttattatggtaaggcaatatgccgtggcgttggggatcgcctatgtccggttttaccggatctccctaaaggtgactaactttggttagtcaccttttt

SEQ ID NO: 519 - skipped

SEQ ID NO: 520 - RNA, 11 nt, synthetic construct
  source 1..11: mol_type = other RNA
  misc_feature 1..11: note = APG09624 crRNA repeat
aggattgaaat

SEQ ID NO: 521 - RNA, 201 nt, synthetic construct
  source 1..201: mol_type = other RNA
  misc_feature 1..201: note = APG09624 tracrRNA
aaacagctagaatgtaacttaaagtaggtcaatgtttaaattcgatgttgcaatttgtttggacaagtggattaaaacgttccttgaaaatcatataaagcagccagtttacgggcttgggcgaatttgcgtccaaagggtgaggccaggtgtaagtaagaacctacaaaagcactcaccaaagggtcaactcgatacatt

SEQ ID NO: 522 - RNA, 11 nt, synthetic construct
  source 1..11: mol_type = other RNA
  misc_feature 1..11: note = APG05405 crRNA repeat
aggattgaaat

SEQ ID NO: 523 - RNA, 201 nt, synthetic construct; identical to SEQ ID NO: 521
  source 1..201: mol_type = other RNA
  misc_feature 1..201: note = APG05405 tracrRNA

SEQ ID NO: 524 - RNA, 17 nt, synthetic construct
  source 1..17: mol_type = other RNA
  misc_feature 1..17: note = APG06622 crRNA repeat
gttgtgatttgctttca

SEQ ID NO: 525 - RNA, 84 nt, synthetic construct
  source 1..84: mol_type = other RNA
  misc_feature 1..84: note = APG06622 tracrRNA
tgaaagcaaatcacaataaggattattccgttgtgaaaacatttgggttgcctcttgtccacaaatcaggaggcttttttattt

SEQ ID NO: 526 - skipped

SEQ ID NO: 527 - RNA, 14 nt, synthetic construct
  source 1..14: mol_type = other RNA
  misc_feature 1..14: note = APG02787 crRNA repeat
gttgtgatttgctt

SEQ ID NO: 528 - RNA, 78 nt, synthetic construct
  source 1..78: mol_type = other RNA
  misc_feature 1..78: note = APG02787 tracrRNA
aagcaaatcacaataaggatttttcttccgttgagaaatcattcacgccgccctcgtcgtttatcgggggcttttttt

SEQ ID NO: 529 - skipped

SEQ ID NO: 530 - RNA, 18 nt, synthetic construct
  source 1..18: mol_type = other RNA
  misc_feature 1..18: note = APG06248 crRNA repeat
gttgtgatttgctttcat

SEQ ID NO: 531 - RNA, 75 nt, synthetic construct
  source 1..75: mol_type = other RNA
  misc_feature 1..75: note = APG06248 tracrRNA
atgaaagcaaatcacaataaggattattccgttgtgaaaacatctaagtcgcctcgccttacaatgcggggcttt

SEQ ID NO: 532 - skipped

SEQ ID NO: 533 - RNA, 14 nt, synthetic construct
  source 1..14: mol_type = other RNA
  misc_feature 1..14: note = APG06007 crRNA repeat
gttgtgaattgctt

SEQ ID NO: 534 - RNA, 63 nt, synthetic construct
  source 1..63: mol_type = other RNA
  misc_feature 1..63: note = APG06007 tracrRNA
aagcaattcacaataaatttttaatgttgtgaaaacattcaaagcggcgcaagtcgctttttt

SEQ ID NO: 535 - skipped

SEQ ID NO: 536 - RNA, 17 nt, synthetic construct
  source 1..17: mol_type = other RNA
  misc_feature 1..17: note = APG02874 crRNA repeat
gtcatagttccattaaa

SEQ ID NO: 537 - RNA, 83 nt, synthetic construct
  source 1..83: mol_type = other RNA
  misc_feature 1..83: note = APG02874 tracrRNA
tttgatgttcctatgataagggccttgagcccgtggcgttggggatcgcctgcccgtttatacgggcttctccctacttactt

SEQ ID NO: 538 - skipped

SEQ ID NO: 539 - RNA, 19 nt, synthetic construct
  source 1..19: mol_type = other RNA
  misc_feature 1..19: note = APG03850 crRNA repeat
gctatagttccataagaaa

SEQ ID NO: 540 - RNA, 115 nt, synthetic construct
  source 1..115: mol_type = other RNA
  misc_feature 1..115: note = APG03850 tracrRNA
tttcttaagttactatagtaagggcaatgacccgtggcgtttggggatcgccttatcctggtatggatattctccccatgtgaaaagcacctaagcatagcgctatggtgctttt

SEQ ID NO: 541 - skipped

SEQ ID NO: 542 - RNA, 16 nt, synthetic construct
  source 1..16: mol_type = other RNA
  misc_feature 1..16: note = APG07553 crRNA repeat
gctatagttccataag

SEQ ID NO: 543 - RNA, 111 nt, synthetic construct
  source 1..111: mol_type = other RNA
  misc_feature 1..111: note = APG07553 tracrRNA
cttaagttactatagtaagggcaatgacccgtggcgtttggggatcgcctcatccattacggatattctccccatgtgaaaagcacctaagcataaggctaaggtgctttt

SEQ ID NO: 544 - skipped

SEQ ID NO: 545 - RNA, 15 nt, synthetic construct
  source 1..15: mol_type = other RNA
  misc_feature 1..15: note = APG03031 crRNA repeat
gttgtgaattgcttt

SEQ ID NO: 546 - RNA, 68 nt, synthetic construct
  source 1..68: mol_type = other RNA
  misc_feature 1..68: note = APG03031 tracrRNA
aaagcaattcacaataaggcttaaaagccgaagaaaatctttagtcctgcgtactccgtgggattttt

SEQ ID NO: 547 - skipped

SEQ ID NO: 548 - RNA, 23 nt, synthetic construct
  source 1..23: mol_type = other RNA
  misc_feature 1..23: note = APG09208 crRNA repeat
gccataattcctctgtaaaactt

SEQ ID NO: 549 - RNA, 112 nt, synthetic construct
  source 1..112: mol_type = other RNA
  misc_feature 1..112: note = APG09208 tracrRNA
aaggtttatagagttattatggtaaggcaatatgccgtggcgttggggatcgcctatgtccggttttaccggatctccctagaggtgactaactttggttagtcgccttttt

SEQ ID NO: 550 - skipped

SEQ ID NO: 551 - RNA, 19 nt, synthetic construct
  source 1..19: mol_type = other RNA
  misc_feature 1..19: note = APG08770 crRNA repeat
gttattgtactctcaataa

SEQ ID NO: 552 - RNA, 67 nt, synthetic construct; identical to SEQ ID NO: 420
  source 1..67: mol_type = other RNA
  misc_feature 1..67: note = APG08770 tracrRNA

SEQ ID NO: 553 - skipped

SEQ ID NO: 554 - RNA, 17 nt, synthetic construct
  source 1..17: mol_type = other RNA
  misc_feature 1..17: note = APG08167 crRNA repeat
gttttagtactctgtaa

SEQ ID NO: 555 - RNA, 64 nt, synthetic construct; identical to SEQ ID NO: 423
  source 1..64: mol_type = other RNA
  misc_feature 1..64: note = APG08167 tracrRNA

SEQ ID NO: 556 - skipped

SEQ ID NO: 557 - RNA, 16 nt, synthetic construct
  source 1..16: mol_type = other RNA
  misc_feature 1..16: note = APG03021 crRNA repeat
gtatttgtactctcaa

SEQ ID NO: 558 - RNA, 68 nt, synthetic construct
  source 1..68: mol_type = other RNA
  misc_feature 1..68: note = APG03021 tracrRNA
ttgcagagcctacaaatataaggcttcatgccgaattcaagcaccccatgtttacatggggtgctttt

SEQ ID NO: 559 - skipped

SEQ ID NO: 560 - RNA, 14 nt, synthetic construct
  source 1..14: mol_type = other RNA
  misc_feature 1..14: note = APG06015 crRNA repeat
gtttcagaagagtg

SEQ ID NO: 561 - RNA, 111 nt, synthetic construct
  source 1..111: mol_type = other RNA
  misc_feature 1..111: note = APG06015 tracrRNA
cattctgttttgaaatcaaacaacgctttacgcggagtttacacatctgtcccattatatgggcattacataataaaagaggaatcacctttaaggttgattcctcttttt

SEQ ID NO: 562 - skipped

SEQ ID NO: 563 - RNA, 22 nt, synthetic construct
  source 1..22: mol_type = other RNA
  misc_feature 1..22: note = APG09344 crRNA repeat
gttttagtgtcatgttgaatag

SEQ ID NO: 564 - RNA, 70 nt, synthetic construct; identical to SEQ ID NO: 214
  source 1..70: mol_type = other RNA
  misc_feature 1..70: note = APG09344 tracrRNA

SEQ ID NO: 565 - skipped

SEQ ID NO: 566 - RNA, 17 nt, synthetic construct
  source 1..17: mol_type = other RNA
  misc_feature 1..17: note = APG07991 crRNA repeat
gttttagagtcatgttg

SEQ ID NO: 567 - RNA, 68 nt, synthetic construct
  source 1..68: mol_type = other RNA
  misc_feature 1..68: note = APG07991 tracrRNA
caacatagcaagttaaaataaggttttaaccgtaatcaactgtaaagtggcgctgtttcggcgctttt

SEQ ID NO: 568 - skipped

SEQ ID NO: 569 - RNA, 15 nt, synthetic construct
  source 1..15: mol_type = other RNA
  misc_feature 1..15: note = APG01868 crRNA repeat
gttttagagctatgc

SEQ ID NO: 570 - RNA, 70 nt, synthetic construct
  source 1..70: mol_type = other RNA
  misc_feature 1..70: note = APG01868 tracrRNA
gcatagcaagttaaaataaggctttgtccgtcatcagcttttttaaagcagcgctgttctcggcgctttt

SEQ ID NO: 571 - skipped

SEQ ID NO: 572 - RNA, 15 nt, synthetic construct
  source 1..15: mol_type = other RNA
  misc_feature 1..15: note = APG02998 crRNA repeat
gttttagagctatgc

SEQ ID NO: 573 - RNA, 66 nt, synthetic construct
  source 1..66: mol_type = other RNA
  misc_feature 1..66: note = APG02998 tracrRNA
gcatagcaagttaaaataaggcttagtccgtaaacaaactttggcactgtattcggtgcttttttt

SEQ ID NO: 574 - skipped

SEQ ID NO: 575 - protein, 1063 aa, synthetic construct
  REGION 1..1063: note = APG07433.1 deletion variant
MRELDYRIGLDIGTNSIGWGVIELSWNKDRERYEKVRIVDQGVRMFDRAEMPKTGASLAEPRRIARSSRRRLNRKSQRKKNIRNLLVQHGVITQEELDSLYPLSKKSMDIWGIRLDGLDRLLNHFEWARLLIHLAQRRGFKSNRKSELKDTETGKVLSSIQLNEKRLSLYRTVGEMWMKDPDFSKYDRKRNSPNEYVFSVSRAELEKEIVTLFAAQRRFQSPYASKDLQETYLQIWTHQLPFASGNAILNKVGYCSLLKGKERRIPKATYTFQYFSALDQVNRTRLGPDFQPFTKEQREIILNNMFQRTDYYKKKTIPEVTYYDIRKWLELDETIQFKGLNYDPNEELKKIEKKPFINLKAFYEINKVVANYSERTNETFSTLDYDGIGYALTVYKTDKDIRSYLKSSHNLPKRCYDDQLIEELLSLSYTKFGHLSLKAINHVLSIMQKGNTYKEAVDQLGYDTSGLKKEKRSKFLPPISDEITNPIVKRALTQARKVVNAIIRRHGSPHSVHIELARELSKNHDERTKIVSAQDENYKKNKGAISILSEHGILNPTGYDIVRYKLWKEQGERCAYSLKEIPADTFFNEPILEVDHILPYSQSFIDSYHNKVLVYSDENRKKGNRIPYTYFLETNKDWEAFERYVRSNKFFSKKKREYLLKRAYLPRESELIKERHLNDTRYASTFLKNFIEQNLQFKEAEDNPRKRRVQTVNGVITAHFRKRWGLEKDRQETYLHHAMDAIIVACTDHHMVTRVTEYYQIKESNKSVKKPYFPMPWEGFRDELLSHLASQPIAKKISEELKAGYQSLDYIFVSRMPKRSITGAAHKQTIMRKGGIDKKGKTIIIERLHLKDIKFDENGDFKMVGKEQDMATYEAIKQRYLEHGKNSKKAFETPLYKPSKKGTGNLIKRVKVEGQAKSFVREVNGGVAQNGDLVRVDLFEKDDKYYMVPIYVPDTVCSELPKKVVASSKGYEQWLTLDNSFTFKFSLYPYDLVRLVKGDEDRFLYFGTLDIDSDRLNFKDVNKPSKKNEYRYSLKTIEDLEKYEVGVLGDLRLVRKETRRNFH

SEQ ID NO: 576 - protein, 1064 aa, synthetic construct
  REGION 1..1064: note = APG08290.1 deletion variant
MSELDYRIGLDIGTNSIGWGVIELFWNKDRERYEKVRIVDKGVRMFDKAEIPNKGASLAEPRRIARSSRRRLNRKSQRKKEIRNLLVQHGMITQEELDLLYPLSKKSIDIWDIRLDGLDRLLNHLEWARLLIHLAQRRGFKSNRKSELKDAETGKVLSSIQVNEKRLFLYRTVGEMWIKDAEFSKYDRRRNSPNEYVFSVSRADLEKEIVTLFEAQRKFQSSYASKNLQETYLQIWAHQLPFASGNAILNKVGYCSLLKGKERRIPKATYTFQYFSALDQVNRTRLGPDFQPFTQEQKEIILDKMFQRTDYYKKKTIPEVSYYDIRKWLELDETIQFKGLNYDPNEELKKIEKKPFINLKAFYEIKKVVANYAERTNEAFSTLDYDAIAYALTVYKTDKDIRSYLKKSNNLSKRCYDDQLIEELFTLSYTKFGHLSFKAINHVLPIMQEGRTYQEAIHQLGYDTTNLKKENRSMFLPLIPDEITNPIVKRAITQARKVVNAIIRRYGSPNSVHIELARELSKSHDERKKIMTAHDENYKKNKGAISILIENGILNPTGYDIVRYKLWKEQGERCAYSLKEIPPDTFFNEPILEVDHILPYSQSFIDSYHNKVLVYSDENRNKGNRIPYTYFLETNKDWEAFERYVRSNKLFSKKKREYLLKKTYLPRESELIKERHLNDTRYASTFLKNFIEQNLQFKEVEVNLRKKRVQTVNGVITAHLRKRWGLEKNRQETYLHHAMDAIIVACTDHHMVTRITEYYQIKESNKSVKKPYFPMPWEGFRDELLSHLASQPIAKKISEELKAGYQSSDYIFVSRMPKRSVTGAAHDQTIRRKGGIDKKGKTIIIKRVRLKDIKFDENGDFKMVGKEQDLATYEAIKQRYLEHRKNSKKAFETPLYKPSKKGTGNLIKRVKIEGQTKAFVREVNGGVAQNSDLVRVDLFEKDDKYYMVPIYVPDTVCSELPKKVVKSGKGYEQWLTLDNSFTFKSSLYPYDLVRLVKGNEDRFLYFGTLDIDSDRLNFKDVNKPSKQNEYRYSLKTIENLEKYEVGVLGDLRLVKQETRRIFNR

SEQ ID NO: 577 - protein, 1310 aa, synthetic construct
  REGION 1..1310: note = LPG20046
MAPKKKRKVGSSGGSSGSNPEFTHEYWMRHALTLARRARDEGEVPVGAVLVLNNQVIGEGWNRAIGLHDPTAHAEIMALRQGGLVLQNYRLWDTTLYSTFEPCVMCSGAMVHSRIGTLVFGVRNSKRGAAGSLMNVLNYPGMNHQVKTIGGVLAPECSGLLCDFYRMPRQVWNQQKDELKSINDSGGSSGGSSGSETPGTSESATPESSGGSSGGSRELDYRIGLAIGTNSIGWGVIELSWNKDRERYEKVRIVDQGVRMFDRAEMPKTGASLAEPRRIARSSRRRLNRKSQRKKNIRNLLVQHGVITQEELDSLYPLSKKSMDIWGIRLDGLDRLLNHFEWARLLIHLAQRRGFKSNRKSELKDTETGKVLSSIQLNEKRLSLYRTVGEMWMKDPDFSKYDRKRNSPNEYVFSVSRAELEKEIVTLFAAQRRFQSPYASKDLQETYLQIWTHQLPFASGNAILNKVGYCSLLKGKERRIPKATYTFQYFSALDQVNRTRLGPDFQPFTKEQREIILNNMFQRTDYYKKKTIPEVTYYDIRKWLELDETIQFKGLNYDPNEELKKIEKKPFINLKAFYEINKVVANYSERTNETFSTLDYDGIGYALTVYKTDKDIRSYLKSSHNLPKRCYDDQLIEELLSLSYTKFGHLSLKAINHVLSIMQKGNTYKEAVDQLGYDTSGLKKEKRSKFLPPISDEITNPIVKRALTQARKVVNAIIRRHGSPHSVHIELARELSKNHDERTKIVSAQDENYKKNKGAISILSEHGILNPTGYDIVRYKLWKEQGERCAYSLKEIPADTFFNELKKERNGAPILEVDHILPYSQSFIDSYHNKVLVYSDENRKKGNRIPYTYFLETNKDWEAFERYVRSNKFFSKKKREYLLKRAYLPRESELIKERHLNDTRYASTFLKNFIEQNLQFKEAEDNPRKRRVQTVNGVITAHFRKRWGLEKDRQETYLHHAMDAIIVACTDHHMVTRVTEYYQIKESNKSVKKPYFPMPWEGFRDELLSHLASQPIAKKISEELKAGYQSLDYIFVSRMPKRSITGAAHKQTIMRKGGIDKKGKTIIIERLHLKDIKFDENGDFKMVGKEQDMATYEAIKQRYLEHGKNSKKAFETPLYKPSKKGTGNLIKRVKVEGQAKSFVREVNGGVAQNGDLVRVDLFEKDDKYYMVPIYVPDTVCSELPKKVVASSKGYEQWLTLDNSFTFKFSLYPYDLVRLVKGDEDRFLYFGTLDIDSDRLNFKDVNKPSKKNEYRYSLKTIEDLEKYEVGVLGDLRLVRKETRRNFHGSSGGSSGKRPAATKKAGQAKKKK

SEQ ID NO: 578 - protein, 1310 aa, synthetic construct
  REGION 1..1310: note = LPG20047
MAPKKKRKVGSSGGSSGSNPEFTHEYWMRHALTLARRARDEGEVPVGAVLVNNNQVIGEGWNRAIGLHDPTAHAEIMALRQGGLVLQNYRLIDTTLYSTFEPCVMCSGAMVHSRIGTLVFGVRNSKRGAAGSLMNVLNYPGMNHQVKTIGGVLAPECSGLLCDFYRMPRQVFRQQKAEWKSINDSGGSSGGSSGSETPGTSESATPESSGGSSGGSRELDYRIGLAIGTNSIGWGVIELSWNKDRERYEKVRIVDQGVRMFDRAEMPKTGASLAEPRRIARSSRRRLNRKSQRKKNIRNLLVQHGVITQEELDSLYPLSKKSMDIWGIRLDGLDRLLNHFEWARLLIHLAQRRGFKSNRKSELKDTETGKVLSSIQLNEKRLSLYRTVGEMWMKDPDFSKYDRKRNSPNEYVFSVSRAELEKEIVTLFAAQRRFQSPYASKDLQETYLQIWTHQLPFASGNAILNKVGYCSLLKGKERRIPKATYTFQYFSALDQVNRTRLGPDFQPFTKEQREIILNNMFQRTDYYKKKTIPEVTYYDIRKWLELDETIQFKGLNYDPNEELKKIEKKPFINLKAFYEINKVVANYSERTNETFSTLDYDGIGYALTVYKTDKDIRSYLKSSHNLPKRCYDDQLIEELLSLSYTKFGHLSLKAINHVLSIMQKGNTYKEAVDQLGYDTSGLKKEKRSKFLPPISDEITNPIVKRALTQARKVVNAIIRRHGSPHSVHIELARELSKNHDERTKIVSAQDENYKKNKGAISILSEHGILNPTGYDIVRYKLWKEQGERCAYSLKEIPADTFFNELKKERNGAPILEVDHILPYSQSFIDSYHNKVLVYSDENRKKGNRIPYTYFLETNKDWEAFERYVRSNKFFSKKKREYLLKRAYLPRESELIKERHLNDTRYASTFLKNFIEQNLQFKEAEDNPRKRRVQTVNGVITAHFRKRWGLEKDRQETYLHHAMDAIIVACTDHHMVTRVTEYYQIKESNKSVKKPYFPMPWEGFRDELLSHLASQPIAKKISEELKAGYQSLDYIFVSRMPKRSITGAAHKQTIMRKGGIDKKGKTIIIERLHLKDIKFDENGDFKMVGKEQDMATYEAIKQRYLEHGKNSKKAFETPLYKPSKKGTGNLIKRVKVEGQAKSFVREVNGGVAQNGDLVRVDLFEKDDKYYMVPIYVPDTVCSELPKKVVASSKGYEQWLTLDNSFTFKFSLYPYDLVRLVKGDEDRFLYFGTLDIDSDRLNFKDVNKPSKKNEYRYSLKTIEDLEKYEVGVLGDLRLVRKETRRNFHGSSGGSSGKRPAATKKAGQAKKKK

SEQ ID NO: 579 - protein, 1284 aa, synthetic construct
  REGION 1..1284: note = LPG20124
MAPKKKRKVGSSGGSSGRELDYRIGLAIGTNSIGWGVIELSWNKDRERYEKVRIVDQGVRMFDRAEMPKTGASLAEPRRIARSSRRRLNRKSQRKKNIRNLLVQHGVITQEELDSLYPLSKKSMDIWGIRLDGLDRLLNHFEWARLLIHLAQRRGFKSNRKSELKDTETGKVLSSIQLNEKRLSLYRTVGEMWMKDPDFSKYDRKRNSPNEYVFSVSRAELEKEIVTLFAAQRRFQSPYASKDLQETYLQIWTHQLPFASGNAILNKVGYCSLLKGKERRIPKATYTFQYFSALDQVNRTRLGPDFQPFTKEQREIILNNMFQRTDYYKKKTIPEVTYYDIRKWLELDETIQFKGLNYDPNEELKKIEKKPFINLKAFYEINKVVANYSERTNETFSTLDYDGIGYALTVYKTDKDIRSYLKSSHNLPKRCYDDQLIEELLSLSYTKFGHLSLKAINHVLSIMQKGNTYKEAVDQLGYDTSGLKKEKRSKFLPPISDEITNPIVKRALTQARKVVNAIIRRHGSPHSVHIELARELSKNHDERTKIVSAQDENYKKNKGAISILSEHGILNPTGYDIVRYKLWKEQGERCAYSLKEIPADTFFNELKKERNGAPILEVDHILPYSQSFIDSYHNKVLVYSDENRKKGNRIPYTYFLETNKDWEAFERYVRSNKFFSKKKREYLLKRAYLPRESELIKERHLNDTRYASTFLKNFIEQNLQFKEAEDNPRKRRVQTVNGVITAHFRKRWGLEKDRQETYLHHAMDAIIVACTDHHMVTRVTEYYQIKESGGSSNPEFTHEYWMRHALTLARRARDEGEVPVGAVLVNNNQVIGEGWNRAIGLHDPTAHAEIMALRQGGLVLQNYRLIDTTLYSTFEPCVMCSGAMVHSRIGTLVFGVRNSKRGAAGSLMNVLNYPGMNHQVKTIGGVLAPECSGLLCDFYRMPRQVFRQQKAEWKSINDSGGNKSVKKPYFPMPWEGFRDELLSHLASQPIAKKISEELKAGYQSLDYIFVSRMPKRSITGAAHKQTIMRKGGIDKKGKTIIIERLHLKDIKFDENGDFKMVGKEQDMATYEAIKQRYLEHGKNSKKAFETPLYKPSKKGTGNLIKRVKVEGQAKSFVREVNGGVAQNGDLVRVDLFEKDDKYYMVPIYVPDTVCSELPKKVVASSKGYEQWLTLDNSFTFKFSLYPYDLVRLVKGDEDRFLYFGTLDIDSDRLNFKDVNKPSKKNEYRYSLKTIEDLEKYEVGVLGDLRLVRKETRRNFHGSSGGSSGKRPAATKKAGQAKKKK

SEQ ID NO: 580 - protein, 1284 aa, synthetic construct
  REGION 1..1284: note = LPG20123
MAPKKKRKVGSSGGSSGRELDYRIGLAIGTNSIGWGVIELSWNKDRERYEKVRIVDQGVRMFDRAEMPKTGASLAEPRRIARSSRRRLNRKSQRKKNIRNLLVQHGVITQEELDSLYPLSKKSMDIWGIRLDGLDRLLNHFEWARLLIHLAQRRGFKSNRKSELKDTETGKVLSSIQLNEKRLSLYRTVGEMWMKDPDFSKYDRKRNSPNEYVFSVSRAELEKEIVTLFAAQRRFQSPYASKDLQETYLQIWTHQLPFASGNAILNKVGYCSLLKGKERRIPKATYTFQYFSALDQVNRTRLGPDFQPFTKEQREIILNNMFQRTDYYKKKTIPEVTYYDIRKWLELDETIQFKGLNYDPNEELKKIEKKPFINLKAFYEINKVVANYSERTNETFSTLDYDGIGYALTVYKTDKDIRSYLKSSHNLPKRCYDDQLIEELLSLSYTKFGHLSLKAINHVLSIMQKGNTYKEAVDQLGYDTSGLKKEKRSKFLPPISDEITNPIVKRALTQARKVVNAIIRRHGSPHSVHIELARELSKNHDERTKIVSAQDENYKKNKGAISILSEHGILNPTGYDIVRYKLWKEQGERCAYSLKEIPADTFFNELKKERNGAPILEVDHILPYSQSFIDSYHNKVLVYSDENRKKGNRIPYTYFLETNKDWEAFERYVRSNKFFSKKKREYLLKRAYLPRESELIKERHLNDTRYASTFLKNFIEQNLQFKEAEDNPRKRRVQTVNGVITAHFRKRWGLEKDRQETYLHHAMDAIIVACTDHHMVTRVTEYYQIKESGGSSNPEFTHEYWMRHALTLARRARDEGEVPVGAVLVLNNQVIGEGWNRAIGLHDPTAHAEIMALRQGGLVLQNYRLWDTTLYSTFEPCVMCSGAMVHSRIGTLVFGVRNSKRGAAGSLMNVLNYPGMNHQVKTIGGVLAPECSGLLCDFYRMPRQVWNQQKDELKSINDSGGNKSVKKPYFPMPWEGFRDELLSHLASQPIAKKISEELKAGYQSLDYIFVSRMPKRSITGAAHKQTIMRKGGIDKKGKTIIIERLHLKDIKFDENGDFKMVGKEQDMATYEAIKQRYLEHGKNSKKAFETPLYKPSKKGTGNLIKRVKVEGQAKSFVREVNGGVAQNGDLVRVDLFEKDDKYYMVPIYVPDTVCSELPKKVVASSKGYEQWLTLDNSFTFKFSLYPYDLVRLVKGDEDRFLYFGTLDIDSDRLNFKDVNKPSKKNEYRYSLKTIEDLEKYEVGVLGDLRLVRKETRRNFHGSSGGSSGKRPAATKKAGQAKKKK

SEQ ID NO: 581 - protein, 1300 aa, synthetic construct
  REGION 1..1300: note = LPG20048
MAPKKKRKVMSNPEFTHEYWMRHALTLARRARDEGEVPVGAVLVLNNQVIGEGWNRAIGLHDPTAHAEIMALRQGGLVLQNYRLIDTTLYVTFEPCVMCSGAMVHSRIGTLVFGVRNSKRGAAGSLMNVLNYPGMNHQVKTIGGVLAPECSGLLCDFYRMPRQVFNQQKAELKSINDSGGSSGGSSGSETPGTSESATPESSGGSSGGSMRELDYRIGLAIGTNSIGWGVIELSWNKDRERYEKVRIVDQGVRMFDRAEMPKTGASLAEPRRIARSSRRRLNRKSQRKKNIRNLLVQHGVITQEELDSLYPLSKKSMDIWGIRLDGLDRLLNHFEWARLLIHLAQRRGFKSNRKSELKDTETGKVLSSIQLNEKRLSLYRTVGEMWMKDPDFSKYDRKRNSPNEYVFSVSRAELEKEIVTLFAAQRRFQSPYASKDLQETYLQIWTHQLPFASGNAILNKVGYCSLLKGKERRIPKATYTFQYFSALDQVNRTRLGPDFQPFTKEQREIILNNMFQRTDYYKKKTIPEVTYYDIRKWLELDETIQFKGLNYDPNEELKKIEKKPFINLKAFYEINKVVANYSERTNETFSTLDYDGIGYALTVYKTDKDIRSYLKSSHNLPKRCYDDQLIEELLSLSYTKFGHLSLKAINHVLSIMQKGNTYKEAVDQLGYDTSGLKKEKRSKFLPPISDEITNPIVKRALTQARKVVNAIIRRHGSPHSVHIELARELSKNHDERTKIVSAQDENYKKNKGAISILSEHGILNPTGYDIVRYKLWKEQGERCAYSLKEIPADTFFNELKKERNGAPILEVDHILPYSQSFIDSYHNKVLVYSDENRKKGNRIPYTYFLETNKDWEAFERYVRSNKFFSKKKREYLLKRAYLPRESELIKERHLNDTRYASTFLKNFIEQNLQFKEAEDNPRKRRVQTVNGVITAHFRKRWGLEKDRQETYLHHAMDAIIVACTDHHMVTRVTEYYQIKESNKSVKKPYFPMPWEGFRDELLSHLASQPIAKKISEELKAGYQSLDYIFVSRMPKRSITGAAHKQTIMRKGGIDKKGKTIIIERLHLKDIKFDENGDFKMVGKEQDMATYEAIKQRYLEHGKNSKKAFETPLYKPSKKGTGNLIKRVKVEGQAKSFVREVNGGVAQNGDLVRVDLFEKDDKYYMVPIYVPDTVCSELPKKVVASSKGYEQWLTLDNSFTFKFSLYPYDLVRLVKGDEDRFLYFGTLDIDSDRLNFKDVNKPSKKNEYRYSLKTIEDLEKYEVGVLGDLRLVRKETRRNFHSGGSKRPAATKKAGQAKKKK

SEQ ID NO: 582 - protein, 1300 aa, synthetic construct
  REGION 1..1300: note = LPG20051
MAPKKKRKVMSNPEFTHEYWMRHALTLARRARDEGEVPVGAVLVNNNQVIGEGWNRAIGLHDPTAHAEIMALRQGGLVLQNYRLIDTTLYSTFEPCVMCSGAMVHSRIGTLVFGVRNSKRGAAGSLMNVLNYPGMNHQVKTIGGVLAPECSGLLCDFYRMPRQVFRQQKAEWKSINDSGGSSGGSSGSETPGTSESATPESSGGSSGGSMRELDYRIGLAIGTNSIGWGVIELSWNKDRERYEKVRIVDQGVRMFDRAEMPKTGASLAEPRRIARSSRRRLNRKSQRKKNIRNLLVQHGVITQEELDSLYPLSKKSMDIWGIRLDGLDRLLNHFEWARLLIHLAQRRGFKSNRKSELKDTETGKVLSSIQLNEKRLSLYRTVGEMWMKDPDFSKYDRKRNSPNEYVFSVSRAELEKEIVTLFAAQRRFQSPYASKDLQETYLQIWTHQLPFASGNAILNKVGYCSLLKGKERRIPKATYTFQYFSALDQVNRTRLGPDFQPFTKEQREIILNNMFQRTDYYKKKTIPEVTYYDIRKWLELDETIQFKGLNYDPNEELKKIEKKPFINLKAFYEINKVVANYSERTNETFSTLDYDGIGYALTVYKTDKDIRSYLKSSHNLPKRCYDDQLIEELLSLSYTKFGHLSLKAINHVLSIMQKGNTYKEAVDQLGYDTSGLKKEKRSKFLPPISDEITNPIVKRALTQARKVVNAIIRRHGSPHSVHIELARELSKNHDERTKIVSAQDENYKKNKGAISILSEHGILNPTGYDIVRYKLWKEQGERCAYSLKEIPADTFFNELKKERNGAPILEVDHILPYSQSFIDSYHNKVLVYSDENRKKGNRIPYTYFLETNKDWEAFERYVRSNKFFSKKKREYLLKRAYLPRESELIKERHLNDTRYASTFLKNFIEQNLQFKEAEDNPRKRRVQTVNGVITAHFRKRWGLEKDRQETYLHHAMDAIIVACTDHHMVTRVTEYYQIKESNKSVKKPYFPMPWEGFRDELLSHLASQPIAKKISEELKAGYQSLDYIFVSRMPKRSITGAAHKQTIMRKGGIDKKGKTIIIERLHLKDIKFDENGDFKMVGKEQDMATYEAIKQRYLEHGKNSKKAFETPLYKPSKKGTGNLIKRVKVEGQAKSFVREVNGGVAQNGDLVRVDLFEKDDKYYMVPIYVPDTVCSELPKKVVASSKGYEQWLTLDNSFTFKFSLYPYDLVRLVKGDEDRFLYFGTLDIDSDRLNFKDVNKPSKKNEYRYSLKTIEDLEKYEVGVLGDLRLVRKETRRNFHSGGSKRPAATKKAGQAKKKK

SEQ ID NO: 583 - protein, 1300 aa, synthetic construct
  REGION 1..1300: note = LPG20055
MAPKKKRKVMSNPEFTHEYWMRHALTLARRARDEGEVPVGAVLVLNNQVIGEGWNRAIGLHDPTAHAEIMALRQGGLVLQNYRLWDTTLYVTFEPCVMCSGAMVHSRIGTLVFGVRNSKRGAAGSLMNVLNYPGMNHQVKTIGGVLAPECSGLLCDFYRMPRQVWNQQKAELKSINDSGGSSGGSSGSETPGTSESATPESSGGSSGGSMRELDYRIGLAIGTNSIGWGVIELSWNKDRERYEKVRIVDQGVRMFDRAEMPKTGASLAEPRRIARSSRRRLNRKSQRKKNIRNLLVQHGVITQEELDSLYPLSKKSMDIWGIRLDGLDRLLNHFEWARLLIHLAQRRGFKSNRKSELKDTETGKVLSSIQLNEKRLSLYRTVGEMWMKDPDFSKYDRKRNSPNEYVFSVSRAELEKEIVTLFAAQRRFQSPYASKDLQETYLQIWTHQLPFASGNAILNKVGYCSLLKGKERRIPKATYTFQYFSALDQVNRTRLGPDFQPFTKEQREIILNNMFQRTDYYKKKTIPEVTYYDIRKWLELDETIQFKGLNYDPNEELKKIEKKPFINLKAFYEINKVVANYSERTNETFSTLDYDGIGYALTVYKTDKDIRSYLKSSHNLPKRCYDDQLIEELLSLSYTKFGHLSLKAINHVLSIMQKGNTYKEAVDQLGYDTSGLKKEKRSKFLPPISDEITNPIVKRALTQARKVVNAIIRRHGSPHSVHIELARELSKNHDERTKIVSAQDENYKKNKGAISILSEHGILNPTGYDIVRYKLWKEQGERCAYSLKEIPADTFFNELKKERNGAPILEVDHILPYSQSFIDSYHNKVLVYSDENRKKGNRIPYTYFLETNKDWEAFERYVRSNKFFSKKKREYLLKRAYLPRESELIKERHLNDTRYASTFLKNFIEQNLQFKEAEDNPRKRRVQTVNGVITAHFRKRWGLEKDRQETYLHHAMDAIIVACTDHHMVTRVTEYYQIKESNKSVKKPYFPMPWEGFRDELLSHLASQPIAKKISEELKAGYQSLDYIFVSRMPKRSITGAAHKQTIMRKGGIDKKGKTIIIERLHLKDIKFDENGDFKMVGKEQDMATYEAIKQRYLEHGKNSKKAFETPLYKPSKKGTGNLIKRVKVEGQAKSFVREVNGGVAQNGDLVRVDLFEKDDKYYMVPIYVPDTVCSELPKKVVASSKGYEQWLTLDNSFTFKFSLYPYDLVRLVKGDEDRFLYFGTLDIDSDRLNFKDVNKPSKKNEYRYSLKTIEDLEKYEVGVLGDLRLVRKETRRNFHSGGSKRPAATKKAGQAKKKK

SEQ ID NO: 584 - protein, 1300 aa, synthetic construct
  REGION 1..1300: note = LPG20056
MAPKKKRKVMSNPEFTHEYWMRHALTLARRARDEGEVPVGAVLVLNNQVIGEGWNRAIGLHDPTAHAEIMALRQGGLVLQNYRLIDTTLYSTFEPCVMCSGAMVHSRIGTLVFGVRNSKRGAAGSLMNVLNYPGMNHQVKTIGGVLAPECSGLLCDFYRMPRQVWNQQKDELKSINDSGGSSGGSSGSETPGTSESATPESSGGSSGGSMRELDYRIGLAIGTNSIGWGVIELSWNKDRERYEKVRIVDQGVRMFDRAEMPKTGASLAEPRRIARSSRRRLNRKSQRKKNIRNLLVQHGVITQEELDSLYPLSKKSMDIWGIRLDGLDRLLNHFEWARLLIHLAQRRGFKSNRKSELKDTETGKVLSSIQLNEKRLSLYRTVGEMWMKDPDFSKYDRKRNSPNEYVFSVSRAELEKEIVTLFAAQRRFQSPYASKDLQETYLQIWTHQLPFASGNAILNKVGYCSLLKGKERRIPKATYTFQYFSALDQVNRTRLGPDFQPFTKEQREIILNNMFQRTDYYKKKTIPEVTYYDIRKWLELDETIQFKGLNYDPNEELKKIEKKPFINLKAFYEINKVVANYSERTNETFSTLDYDGIGYALTVYKTDKDIRSYLKSSHNLPKRCYDDQLIEELLSLSYTKFGHLSLKAINHVLSIMQKGNTYKEAVDQLGYDTSGLKKEKRSKFLPPISDEITNPIVKRALTQARKVVNAIIRRHGSPHSVHIELARELSKNHDERTKIVSAQDENYKKNKGAISILSEHGILNPTGYDIVRYKLWKEQGERCAYSLKEIPADTFFNELKKERNGAPILEVDHILPYSQSFIDSYHNKVLVYSDENRKKGNRIPYTYFLETNKDWEAFERYVRSNKFFSKKKREYLLKRAYLPRESELIKERHLNDTRYASTFLKNFIEQNLQFKEAEDNPRKRRVQTVNGVITAHFRKRWGLEKDRQETYLHHAMDAIIVACTDHHMVTRVTEYYQIKESNKSVKKPYFPMPWEGFRDELLSHLASQPIAKKISEELKAGYQSLDYIFVSRMPKRSITGAAHKQTIMRKGGIDKKGKTIIIERLHLKDIKFDENGDFKMVGKEQDMATYEAIKQRYLEHGKNSKKAFETPLYKPSKKGTGNLIKRVKVEGQAKSFVREVNGGVAQNGDLVRVDLFEKDDKYYMVPIYVPDTVCSELPKKVVASSKGYEQWLTLDNSFTFKFSLYPYDLVRLVKGDEDRFLYFGTLDIDSDRLNFKDVNKPSKKNEYRYSLKTIEDLEKYEVGVLGDLRLVRKETRRNFHSGGSKRPAATKKAGQAKKKK

SEQ ID NO: 585 - protein, 1300 aa, synthetic construct
  REGION 1..1300: note = LPG20057
MAPKKKRKVMSNPEFTHEYWMRHALTLARRARDEGEVPVGAVLVLNNQVIGEGWNRAIGLHDPTAHAEIMALRQGGLVLQNYRLIDTTLYSTFEPCVMCSGAMVHSRIGTLVFGVRNSKRGAAGSLMNVLNYPGMNHQVKTIGGVLAPECSGLLADFYRMPRQVWNQQKAELKSINDSGGSSGGSSGSETPGTSESATPESSGGSSGGSMRELDYRIGLAIGTNSIGWGVIELSWNKDRERYEKVRIVDQGVRMFDRAEMPKTGASLAEPRRIARSSRRRLNRKSQRKKNIRNLLVQHGVITQEELDSLYPLSKKSMDIWGIRLDGLDRLLNHFEWARLLIHLAQRRGFKSNRKSELKDTETGKVLSSIQLNEKRLSLYRTVGEMWMKDPDFSKYDRKRNSPNEYVFSVSRAELEKEIVTLFAAQRRFQSPYASKDLQETYLQIWTHQLPFASGNAILNKVGYCSLLKGKERRIPKATYTFQYFSALDQVNRTRLGPDFQPFTKEQREIILNNMFQRTDYYKKKTIPEVTYYDIRKWLELDETIQFKGLNYDPNEELKKIEKKPFINLKAFYEINKVVANYSERTNETFSTLDYDGIGYALTVYKTDKDIRSYLKSSHNLPKRCYDDQLIEELLSLSYTKFGHLSLKAINHVLSIMQKGNTYKEAVDQLGYDTSGLKKEKRSKFLPPISDEITNPIVKRALTQARKVVNAIIRRHGSPHSVHIELARELSKNHDERTKIVSAQDENYKKNKGAISILSEHGILNPTGYDIVRYKLWKEQGERCAYSLKEIPADTFFNELKKERNGAPILEVDHILPYSQSFIDSYHNKVLVYSDENRKKGNRIPYTYFLETNKDWEAFERYVRSNKFFSKKKREYLLKRAYLPRESELIKERHLNDTRYASTFLKNFIEQNLQFKEAEDNPRKRRVQTVNGVITAHFRKRWGLEKDRQETYLHHAMDAIIVACTDHHMVTRVTEYYQIKESNKSVKKPYFPMPWEGFRDELLSHLASQPIAKKISEELKAGYQSLDYIFVSRMPKRSITGAAHKQTIMRKGGIDKKGKTIIIERLHLKDIKFDENGDFKMVGKEQDMATYEAIKQRYLEHGKNSKKAFETPLYKPSKKGTGNLIKRVKVEGQAKSFVREVNGGVAQNGDLVRVDLFEKDDKYYMVPIYVPDTVCSELPKKVVASSKGYEQWLTLDNSFTFKFSLYPYDLVRLVKGDEDRFLYFGTLDIDSDRLNFKDVNKPSKKNEYRYSLKTIEDLEKYEVGVLGDLRLVRKETRRNFHSGGSKRPAATKKAGQAKKKK

SEQ ID NO: 586 - protein, 1300 aa, synthetic construct
  REGION 1..1300: note = LPG20058
MAPKKKRKVMSNPEFTHEYWMRHALTLARRARDEGEVPVGAVLVLNNQVIGEGWNRAIGLHDPTAHAEIMALRQGGLVLQNYRLIDTTLYSTFEPCVMCSGAMVHSRIGTLVFGVRNSKRGAAGSLMNVLNYPGMNHQVKTIGGVLAPECSGLLMDFYRMPRQVFNQQKWELKSINDSGGSSGGSSGSETPGTSESATPESSGGSSGGSMRELDYRIGLAIGTNSIGWGVIELSWNKDRERYEKVRIVDQGVRMFDRAEMPKTGASLAEPRRIARSSRRRLNRKSQRKKNIRNLLVQHGVITQEELDSLYPLSKKSMDIWGIRLDGLDRLLNHFEWARLLIHLAQRRGFKSNRKSELKDTETGKVLSSIQLNEKRLSLYRTVGEMWMKDPDFSKYDRKRNSPNEYVFSVSRAELEKEIVTLFAAQRRFQSPYASKDLQETYLQIWTHQLPFASGNAILNKVGYCSLLKGKERRIPKATYTFQYFSALDQVNRTRLGPDFQPFTKEQREIILNNMFQRTDYYKKKTIPEVTYYDIRKWLELDETIQFKGLNYDPNEELKKIEKKPFINLKAFYEINKVVANYSERTNETFSTLDYDGIGYALTVYKTDKDIRSYLKSSHNLPKRCYDDQLIEELLSLSYTKFGHLSLKAINHVLSIMQKGNTYKEAVDQLGYDTSGLKKEKRSKFLPPISDEITNPIVKRALTQARKVVNAIIRRHGSPHSVHIELARELSKNHDERTKIVSAQDENYKKNKGAISILSEHGILNPTGYDIVRYKLWKEQGERCAYSLKEIPADTFFNELKKERNGAPILEVDHILPYSQSFIDSYHNKVLVYSDENRKKGNRIPYTYFLETNKDWEAFERYVRSNKFFSKKKREYLLKRAYLPRESELIKERHLNDTRYASTFLKNFIEQNLQFKEAEDNPRKRRVQTVNGVITAHFRKRWGLEKDRQETYLHHAMDAIIVACTDHHMVTRVTEYYQIKESNKSVKKPYFPMPWEGFRDELLSHLASQPIAKKISEELKAGYQSLDYIFVSRMPKRSITGAAHKQTIMRKGGIDKKGKTIIIERLHLKDIKFDENGDFKMVGKEQDMATYEAIKQRYLEHGKNSKKAFETPLYKPSKKGTGNLIKRVKVEGQAKSFVREVNGGVAQNGDLVRVDLFEKDDKYYMVPIYVPDTVCSELPKKVVASSKGYEQWLTLDNSFTFKFSLYPYDLVRLVKGDEDRFLYFGTLDIDSDRLNFKDVNKPSKKNEYRYSLKTIEDLEKYEVGVLGDLRLVRKETRRNFHSGGSKRPAATKKAGQAKKKK

SEQ ID NO: 587 - protein, 1300 aa, synthetic construct
  REGION 1..1300: note = LPG20059
MAPKKKRKVMSNPEFTHEYWMRHALTLARRARDEGEVPVGAVLVLNNQVIGEGWNRAIGLHDPTAHAEIMALRQGGLVLQNYRLIGTTLYSTFEPCVMCSGAMVHSRIGTLVFGVRNSKRGAAGSLMNVLNYPGMNHQVKTIGGVLAPECSGLLCDFYRMPRQVFNQQKAELKSINDSGGSSGGSSGSETPGTSESATPESSGGSSGGSMRELDYRIGLAIGTNSIGWGVIELSWNKDRERYEKVRIVDQGVRMFDRAEMPKTGASLAEPRRIARSSRRRLNRKSQRKKNIRNLLVQHGVITQEELDSLYPLSKKSMDIWGIRLDGLDRLLNHFEWARLLIHLAQRRGFKSNRKSELKDTETGKVLSSIQLNEKRLSLYRTVGEMWMKDPDFSKYDRKRNSPNEYVFSVSRAELEKEIVTLFAAQRRFQSPYASKDLQETYLQIWTHQLPFASGNAILNKVGYCSLLKGKERRIPKATYTFQYFSALDQVNRTRLGPDFQPFTKEQREIILNNMFQRTDYYKKKTIPEVTYYDIRKWLELDETIQFKGLNYDPNEELKKIEKKPFINLKAFYEINKVVANYSERTNETFSTLDYDGIGYALTVYKTDKDIRSYLKSSHNLPKRCYDDQLIEELLSLSYTKFGHLSLKAINHVLSIMQKGNTYKEAVDQLGYDTSGLKKEKRSKFLPPISDEITNPIVKRALTQARKVVNAIIRRHGSPHSVHIELARELSKNHDERTKIVSAQDENYKKNKGAISILSEHGILNPTGYDIVRYKLWKEQGERCAYSLKEIPADTFFNELKKERNGAPILEVDHILPYSQSFIDSYHNKVLVYSDENRKKGNRIPYTYFLETNKDWEAFERYVRSNKFFSKKKREYLLKRAYLPRESELIKERHLNDTRYASTFLKNFIEQNLQFKEAEDNPRKRRVQTVNGVITAHFRKRWGLEKDRQETYLHHAMDAIIVACTDHHMVTRVTEYYQIKESNKSVKKPYFPMPWEGFRDELLSHLASQPIAKKISEELKAGYQSLDYIFVSRMPKRSITGAAHKQTIMRKGGIDKKGKTIIIERLHLKDIKFDENGDFKMVGKEQDMATYEAIKQRYLEHGKNSKKAFETPLYKPSKKGTGNLIKRVKVEGQAKSFVREVNGGVAQNGDLVRVDLFEKDDKYYMVPIYVPDTVCSELPKKVVASSKGYEQWLTLDNSFTFKFSLYPYDLVRLVKGDEDRFLYFGTLDIDSDRLNFKDVNKPSKKNEYRYSLKTIEDLEKYEVGVLGDLRLVRKETRRNFHSGGSKRPAATKKAGQAKKKK

SEQ ID NO: 588 - protein, 1300 aa, synthetic construct
  REGION 1..1300: note = LPG20060
MAPKKKRKVMSNPEFTHEYWMRHALTLARRARDEGEVPVGAVLVLNNQVIGEGWNRAIGLHDPTAHAEIMALRQGGLVLQNYRLIDTTLYSTFEPCVMCSGAMVHSRIGTLVFGVRNSKRGAAGSLLNVLNYPGMNHQVKTIGGVLAPECSGLLCDFYRMPRQVFNQQKAELKSINDSGGSSGGSSGSETPGTSESATPESSGGSSGGSMRELDYRIGLAIGTNSIGWGVIELSWNKDRERYEKVRIVDQGVRMFDRAEMPKTGASLAEPRRIARSSRRRLNRKSQRKKNIRNLLVQHGVITQEELDSLYPLSKKSMDIWGIRLDGLDRLLNHFEWARLLIHLAQRRGFKSNRKSELKDTETGKVLSSIQLNEKRLSLYRTVGEMWMKDPDFSKYDRKRNSPNEYVFSVSRAELEKEIVTLFAAQRRFQSPYASKDLQETYLQIWTHQLPFASGNAILNKVGYCSLLKGKERRIPKATYTFQYFSALDQVNRTRLGPDFQPFTKEQREIILNNMFQRTDYYKKKTIPEVTYYDIRKWLELDETIQFKGLNYDPNEELKKIEKKPFINLKAFYEINKVVANYSERTNETFSTLDYDGIGYALTVYKTDKDIRSYLKSSHNLPKRCYDDQLIEELLSLSYTKFGHLSLKAINHVLSIMQKGNTYKEAVDQLGYDTSGLKKEKRSKFLPPISDEITNPIVKRALTQARKVVNAIIRRHGSPHSVHIELARELSKNHDERTKIVSAQDENYKKNKGAISILSEHGILNPTGYDIVRYKLWKEQGERCAYSLKEIPADTFFNELKKERNGAPILEVDHILPYSQSFIDSYHNKVLVYSDENRKKGNRIPYTYFLETNKDWEAFERYVRSNKFFSKKKREYLLKRAYLPRESELIKERHLNDTRYASTFLKNFIEQNLQFKEAEDNPRKRRVQTVNGVITAHFRKRWGLEKDRQETYLHHAMDAIIVACTDHHMVTRVTEYYQIKESNKSVKKPYFPMPWEGFRDELLSHLASQPIAKKISEELKAGYQSLDYIFVSRMPKRSITGAAHKQTIMRKGGIDKKGKTIIIERLHLKDIKFDENGDFKMVGKEQDMATYEAIKQRYLEHGKNSKKAFETPLYKPSKKGTGNLIKRVKVEGQAKSFVREVNGGVAQNGDLVRVDLFEKDDKYYMVPIYVPDTVCSELPKKVVASSKGYEQWLTLDNSFTFKFSLYPYDLVRLVKGDEDRFLYFGTLDIDSDRLNFKDVNKPSKKNEYRYSLKTIEDLEKYEVGVLGDLRLVRKETRRNFHSGGSKRPAATKKAGQAKKKK

SEQ ID NO: 589 - protein, 1300 aa, synthetic construct
  REGION 1..1300: note = LPG20050
MAPKKKRKVMSNPEFTHEYWMRHALTLARRARDEGEVPVGAVLVLNNQVIGEGWNRAIGLHDPTAHAEIMALRQGGLVLQNYRLIDTTLYSTFEPCVMCSGAMVHSRIGTLVFGVRNSKRGAAGSLMNVLNYPGMNHQVKTIGGVLAPECSGLLCDFYRMPRQVFNQQKAELKSINDSGGSSGGSSGSETPGTSESATPESSGGSSGGSMRELDYRIGLAIGTNSIGWGVIELSWNKDRERYEKVRIVDQGVRMFDRAEMPKTGASLAEPRRIARSSRRRLNRKSQRKKNIRNLLVQHGVITQEELDSLYPLSKKSMDIWGIRLDGLDRLLNHFEWARLLIHLAQRRGFKSNRKSELKDTETGKVLSSIQLNEKRLSLYRTVGEMWMKDPDFSKYDRKRNSPNEYVFSVSRAELEKEIVTLFAAQRRFQSPYASKDLQETYLQIWTHQLPFASGNAILNKVGYCSLLKGKERRIPKATYTFQYFSALDQVNRTRLGPDFQPFTKEQREIILNNMFQRTDYYKKKTIPEVTYYDIRKWLELDETIQFKGLNYDPNEELKKIEKKPFINLKAFYEINKVVANYSERTNETFSTLDYDGIGYALTVYKTDKDIRSYLKSSHNLPKRCYDDQLIEELLSLSYTKFGHLSLKAINHVLSIMQKGNTYKEAVDQLGYDTSGLKKEKRSKFLPPISDEITNPIVKRALTQARKVVNAIIRRHGSPHSVHIELARELSKNHDERTKIVSAQDENYKKNKGAISILSEHGILNPTGYDIVRYKLWKEQGERCAYSLKEIPADTFFNELKKERNGAPILEVDHILPYSQSFIDSYHNKVLVYSDENRKKGNRIPYTYFLETNKDWEAFERYVRSNKFFSKKKREYLLKRAYLPRESELIKERHLNDTRYASTFLKNFIEQNLQFKEAEDNPRKRRVQTVNGVITAHFRKRWGLEKDRQETYLHHAMDAIIVACTDHHMVTRVTEYYQIKESNKSVKKPYFPMPWEGFRDELLSHLASQPIAKKISEELKAGYQSLDYIFVSRMPKRSITGAAHKQTIMRKGGIDKKGKTIIIERLHLKDIKFDENGDFKMVGKEQDMATYEAIKQRYLEHGKNSKKAFETPLYKPSKKGTGNLIKRVKVEGQAKSFVREVNGGVAQNGDLVRVDLFEKDDKYYMVPIYVPDTVCSELPKKVVASSKGYEQWLTLDNSFTFKFSLYPYDLVRLVKGDEDRFLYFGTLDIDSDRLNFKDVNKPSKKNEYRYSLKTIEDLEKYEVGVLGDLRLVRKETRRNFHSGGSKRPAATKKAGQAKKKK

SEQ ID NO: 590 - protein, 1300 aa, synthetic construct
  REGION 1..1300: note = LPG20053
MAPKKKRKVMSNPEFTHEYWMRHALTLARRARDEGEVPVGAVLVNNNQVIGEGWNQAIGLHDPTAHAEIMALRQGGLMLQNYRLIDTTLYSTFEPCVMCSGAMVHSRIGTLVFGVRNHKRGAAGSLMNVLNYPGMNHQVKTIGGVLAPECSGLLCDFYRMPRQVWRQQKAEWKSINDSGGSSGGSSGSETPGTSESATPESSGGSSGGSMRELDYRIGLAIGTNSIGWGVIELSWNKDRERYEKVRIVDQGVRMFDRAEMPKTGASLAEPRRIARSSRRRLNRKSQRKKNIRNLLVQHGVITQEELDSLYPLSKKSMDIWGIRLDGLDRLLNHFEWARLLIHLAQRRGFKSNRKSELKDTETGKVLSSIQLNEKRLSLYRTVGEMWMKDPDFSKYDRKRNSPNEYVFSVSRAELEKEIVTLFAAQRRFQSPYASKDLQETYLQIWTHQLPFASGNAILNKVGYCSLLKGKERRIPKATYTFQYFSALDQVNRTRLGPDFQPFTKEQREIILNNMFQRTDYYKKKTIPEVTYYDIRKWLELDETIQFKGLNYDPNEELKKIEKKPFINLKAFYEINKVVANYSERTNETFSTLDYDGIGYALTVYKTDKDIRSYLKSSHNLPKRCYDDQLIEELLSLSYTKFGHLSLKAINHVLSIMQKGNTYKEAVDQLGYDTSGLKKEKRSKFLPPISDEITNPIVKRALTQARKVVNAIIRRHGSPHSVHIELARELSKNHDERTKIVSAQDENYKKNKGAISILSEHGILNPTGYDIVRYKLWKEQGERCAYSLKEIPADTFFNELKKERNGAPILEVDHILPYSQSFIDSYHNKVLVYSDENRKKGNRIPYTYFLETNKDWEAFERYVRSNKFFSKKKREYLLKRAYLPRESELIKERHLNDTRYASTFLKNFIEQNLQFKEAEDNPRKRRVQTVNGVITAHFRKRWGLEKDRQETYLHHAMDAIIVACTDHHMVTRVTEYYQIKESNKSVKKPYFPMPWEGFRDELLSHLASQPIAKKISEELKAGYQSLDYIFVSRMPKRSITGAAHKQTIMRKGGIDKKGKTIIIERLHLKDIKFDENGDFKMVGKEQDMATYEAIKQRYLEHGKNSKKAFETPLYKPSKKGTGNLIKRVKVEGQAKSFVREVNGGVAQNGDLVRVDLFEKDDKYYMVPIYVPDTVCSELPKKVVASSKGYEQWLTLDNSFTFKFSLYPYDLVRLVKGDEDRFLYFGTLDIDSDRLNFKDVNKPSKKNEYRYSLKTIEDLEKYEVGVLGDLRLVRKETRRNFHSGGSKRPAATKKAGQAKKKK

SEQ ID NO: 591 - protein, 1300 aa, synthetic construct
  REGION 1..1300: note = LPG20054
MAPKKKRKVMSNPEFTHEYWMRHALTLARRARDEGEVPVGAVLVLNNQVIGEGWNRAIGLHDPTAHAEIMALRQGGLVLQNYRLWDTTLYVTFEPCVMCSGAMVHSRIGTLVFGVRNSKRGAAGSLMNVLNYPGMNHQVKTIGGVLAPECSGLLCDFYRMPRQVFNQQKAELKSINDSGGSSGGSSGSETPGTSESATPESSGGSSGGSMRELDYRIGLAIGTNSIGWGVIELSWNKDRERYEKVRIVDQGVRMFDRAEMPKTGASLAEPRRIARSSRRRLNRKSQRKKNIRNLLVQHGVITQEELDSLYPLSKKSMDIWGIRLDGLDRLLNHFEWARLLIHLAQRRGFKSNRKSELKDTETGKVLSSIQLNEKRLSLYRTVGEMWMKDPDFSKYDRKRNSPNEYVFSVSRAELEKEIVTLFAAQRRFQSPYASKDLQETYLQIWTHQLPFASGNAILNKVGYCSLLKGKERRIPKATYTFQYFSALDQVNRTRLGPDFQPFTKEQREIILNNMFQRTDYYKKKTIPEVTYYDIRKWLELDETIQFKGLNYDPNEELKKIEKKPFINLKAFYEINKVVANYSERTNETFSTLDYDGIGYALTVYKTDKDIRSYLKSSHNLPKRCYDDQLIEELLSLSYTKFGHLSLKAINHVLSIMQKGNTYKEAVDQLGYDTSGLKKEKRSKFLPPISDEITNPIVKRALTQARKVVNAIIRRHGSPHSVHIELARELSKNHDERTKIVSAQDENYKKNKGAISILSEHGILNPTGYDIVRYKLWKEQGERCAYSLKEIPADTFFNELKKERNGAPILEVDHILPYSQSFIDSYHNKVLVYSDENRKKGNRIPYTYFLETNKDWEAFERYVRSNKFFSKKKREYLLKRAYLPRESELIKERHLNDTRYASTFLKNFIEQNLQFKEAEDNPRKRRVQTVNGVITAHFRKRWGLEKDRQETYLHHAMDAIIVACTDHHMVTRVTEYYQIKESNKSVKKPYFPMPWEGFRDELLSHLASQPIAKKISEELKAGYQSLDYIFVSRMPKRSITGAAHKQTIMRKGGIDKKGKTIIIERLHLKDIKFDENGDFKMVGKEQDMATYEAIKQRYLEHGKNSKKAFETPLYKPSKKGTGNLIKRVKVEGQAKSFVREVNGGVAQNGDLVRVDLFEKDDKYYMVPIYVPDTVCSELPKKVVASSKGYEQWLTLDNSFTFKFSLYPYDLVRLVKGDEDRFLYFGTLDIDSDRLNFKDVNKPSKKNEYRYSLKTIEDLEKYEVGVLGDLRLVRKETRRNFHSGGSKRPAATKKAGQAKKKK

SEQ ID NO: 592 - protein, 1273 aa, synthetic construct
  REGION 1..1273: note = LPG20044
MAPKKKRKVMRELDYRIGLAIGTNSIGWGVIELSWNKDRERYEKVRIVDQGVRMFDRAEMPKTGASLAEPRRIARSSRRRLNRKSQRKKNIRNLLVQHGVITQEELDSLYPLSKKSMDIWGIRLDGLDRLLNHFEWARLLIHLAQRRGFKSNRKSELKDTETGKVLSSIQLNEKRLSLYRTVGEMWMKDPDFSKYDRKRNSPNEYVFSVSRAELEKEIVTLFAAQRRFQSPYASKDLQETYLQIWTHQLPFASGNAILNKVGYCSLLKGKERRIPKATYTFQYFSALDQVNRTRLGPDFQPFTKEQREIILNNMFQRTDYYKKKTIPEVTYYDIRKWLELDETIQFKGLNYDPNEELKKIEKKPFINLKAFYEINKVVANYSERTNETFSTLDYDGIGYALTVYKTDKDIRSYLKSSHNLPKRCYDDQLIEELLSLSYTKFGHLSLKAINHVLSIMQKGNTYKEAVDQLGYDTSGLKKEKRSKFLPPISDEITNPIVKRALTQARKVVNAIIRRHGSPHSVHIELARELSKNHDERTKIVSAQDENYKKNKGAISILSEHGILNPTGYDIVRYKLWKEQGERCAYSLKEIPADTFFNELKKERNGAPILEVDHILPYSQSFIDSYHNKVLVYSDENRKKGNRIPYTYFLETGGSSNPEFTHEYWMRHALTLARRARDEGEVPVGAVLVLNNQVIGEGWNRAIGLHDPTAHAEIMALRQGGLVLQNYRLIDTTLYSTFEPCVMCSGAMVHSRIGTLVFGVRNSKRGAAGSLMNVLNYPGMNHQVKTIGGVLAPECSGLLCDFYRMPRQVFNQQKAELKSINDSGGNKDWEAFERYVRSNKFFSKKKREYLLKRAYLPRESELIKERHLNDTRYASTFLKNFIEQNLQFKEAEDNPRKRRVQTVNGVITAHFRKRWGLEKDRQETYLHHAMDAIIVACTDHHMVTRVTEYYQIKESNKSVKKPYFPMPWEGFRDELLSHLASQPIAKKISEELKAGYQSLDYIFVSRMPKRSITGAAHKQTIMRKGGIDKKGKTIIIERLHLKDIKFDENGDFKMVGKEQDMATYEAIKQRYLEHGKNSKKAFETPLYKPSKKGTGNLIKRVKVEGQAKSFVREVNGGVAQNGDLVRVDLFEKDDKYYMVPIYVPDTVCSELPKKVVASSKGYEQWLTLDNSFTFKFSLYPYDLVRLVKGDEDRFLYFGTLDIDSDRLNFKDVNKPSKKNEYRYSLKTIEDLEKYEVGVLGDLRLVRKETRRNFHSGGSKRPAATKKAGQAKKKK

SEQ ID NO: 593 - protein, 1300 aa, synthetic construct
  REGION 1..1300: note = LPG20052
MAPKKKRKVMSNPEFTHEYWMRHALTLARRARDEGEVPVGAVLVLNNQVIGEGWNRAIGLHDPTAHAEIMALRQGGLALQNYRLIDTTLYSTFEPCVMCSGAMVHSRIGTLVFGVRNSKRGAAGSLMNVLNYPGMNHQVKTIGGVLAPECSGLLCDFYRMPRQVFNQQKAELKSINDSGGSSGGSSGSETPGTSESATPESSGGSSGGSMRELDYRIGLAIGTNSIGWGVIELSWNKDRERYEKVRIVDQGVRMFDRAEMPKTGASLAEPRRIARSSRRRLNRKSQRKKNIRNLLVQHGVITQEELDSLYPLSKKSMDIWGIRLDGLDRLLNHFEWARLLIHLAQRRGFKSNRKSELKDTETGKVLSSIQLNEKRLSLYRTVGEMWMKDPDFSKYDRKRNSPNEYVFSVSRAELEKEIVTLFAAQRRFQSPYASKDLQETYLQIWTHQLPFASGNAILNKVGYCSLLKGKERRIPKATYTFQYFSALDQVNRTRLGPDFQPFTKEQREIILNNMFQRTDYYKKKTIPEVTYYDIRKWLELDETIQFKGLNYDPNEELKKIEKKPFINLKAFYEINKVVANYSERTNETFSTLDYDGIGYALTVYKTDKDIRSYLKSSHNLPKRCYDDQLIEELLSLSYTKFGHLSLKAINHVLSIMQKGNTYKEAVDQLGYDTSGLKKEKRSKFLPPISDEITNPIVKRALTQARKVVNAIIRRHGSPHSVHIELARELSKNHDERTKIVSAQDENYKKNKGAISILSEHGILNPTGYDIVRYKLWKEQGERCAYSLKEIPADTFFNELKKERNGAPILEVDHILPYSQSFIDSYHNKVLVYSDENRKKGNRIPYTYFLETNKDWEAFERYVRSNKFFSKKKREYLLKRAYLPRESELIKERHLNDTRYASTFLKNFIEQNLQFKEAEDNPRKRRVQTVNGVITAHFRKRWGLEKDRQETYLHHAMDAIIVACTDHHMVTRVTEYYQIKESNKSVKKPYFPMPWEGFRDELLSHLASQPIAKKISEELKAGYQSLDYIFVSRMPKRSITGAAHKQTIMRKGGIDKKGKTIIIERLHLKDIKFDENGDFKMVGKEQDMATYEAIKQRYLEHGKNSKKAFETPLYKPSKKGTGNLIKRVKVEGQAKSFVREVNGGVAQNGDLVRVDLFEKDDKYYMVPIYVPDTVCSELPKKVVASSKGYEQWLTLDNSFTFKFSLYPYDLVRLVKGDEDRFLYFGTLDIDSDRLNFKDVNKPSKKNEYRYSLKTIEDLEKYEVGVLGDLRLVRKETRRNFHSGGSKRPAATKKAGQAKKKK

SEQ ID NO: 594 - protein, 1300 aa, synthetic construct
  REGION 1..1300: note = LPG20049
MAPKKKRKVMSNPEFTHEYWMRHALTLARRARDEGEVPVGAVLVLNNQVIGEGWNRAIGLHDPTAHAEIMALRQGGLVLQNYRLWDTTLYSTFEPCVMCSGAMVHSRIGTLVFGVRNSKRGAAGSLMNVLNYPGMNHQVKTIGGVLAPECSGLLCDFYRMPRQVWNQQKDELKSINDSGGSSGGSSGSETPGTSESATPESSGGSSGGSMRELDYRIGLAIGTNSIGWGVIELSWNKDRERYEKVRIVDQGVRMFDRAEMPKTGASLAEPRRIARSSRRRLNRKSQRKKNIRNLLVQHGVITQEELDSLYPLSKKSMDIWGIRLDGLDRLLNHFEWARLLIHLAQRRGFKSNRKSELKDTETGKVLSSIQLNEKRLSLYRTVGEMWMKDPDFSKYDRKRNSPNEYVFSVSRAELEKEIVTLFAAQRRFQSPYASKDLQETYLQIWTHQLPFASGNAILNKVGYCSLLKGKERRIPKATYTFQYFSALDQVNRTRLGPDFQPFTKEQREIILNNMFQRTDYYKKKTIPEVTYYDIRKWLELDETIQFKGLNYDPNEELKKIEKKPFINLKAFYEINKVVANYSERTNETFSTLDYDGIGYALTVYKTDKDIRSYLKSSHNLPKRCYDDQLIEELLSLSYTKFGHLSLKAINHVLSIMQKGNTYKEAVDQLGYDTSGLKKEKRSKFLPPISDEITNPIVKRALTQARKVVNAIIRRHGSPHSVHIELARELSKNHDERTKIVSAQDENYKKNKGAISILSEHGILNPTGYDIVRYKLWKEQGERCAYSLKEIPADTFFNELKKERNGAPILEVDHILPYSQSFIDSYHNKVLVYSDENRKKGNRIPYTYFLETNKDWEAFERYVRSNKFFSKKKREYLLKRAYLPRESELIKERHLNDTRYASTFLKNFIEQNLQFKEAEDNPRKRRVQTVNGVITAHFRKRWGLEKDRQETYLHHAMDAIIVACTDHHMVTRVTEYYQIKESNKSVKKPYFPMPWEGFRDELLSHLASQPIAKKISEELKAGYQSLDYIFVSRMPKRSITGAAHKQTIMRKGGIDKKGKTIIIERLHLKDIKFDENGDFKMVGKEQDMATYEAIKQRYLEHGKNSKKAFETPLYKPSKKGTGNLIKRVKVEGQAKSFVREVNGGVAQNGDLVRVDLFEKDDKYYMVPIYVPDTVCSELPKKVVASSKGYEQWLTLDNSFTFKFSLYPYDLVRLVKGDEDRFLYFGTLDIDSDRLNFKDVNKPSKKNEYRYSLKTIEDLEKYEVGVLGDLRLVRKETRRNFHSGGSKRPAATKKAGQAKKKK

SEQ ID NO: 595 - protein, 1273 aa, synthetic construct
  REGION 1..1273: note = LPG20045
MAPKKKRKVMRELDYRIGLAIGTNSIGWGVIELSWNKDRERYEKVRIVDQGVRMFDRAEMPKTGASLAEPRRIARSSRRRLNRKSQRKKNIRNLLVQHGVITQEELDSLYPLSKKSMDIWGIRLDGLDRLLNHFEWARLLIHLAQRRGFKSNRKSELKDTETGKVLSSIQLNEKRLSLYRTVGEMWMKDPDFSKYDRKRNSPNEYVFSVSRAELEKEIVTLFAAQRRFQSPYASKDLQETYLQIWTHQLPFASGNAILNKVGYCSLLKGKERRIPKATYTFQYFSALDQVNRTRLGPDFQPFTKEQREIILNNMFQRTDYYKKKTIPEVTYYDIRKWLELDETIQFKGLNYDPNEELKKIEKKPFINLKAFYEINKVVANYSERTNETFSTLDYDGIGYALTVYKTDKDIRSYLKSSHNLPKRCYDDQLIEELLSLSYTKFGHLSLKAINHVLSIMQKGNTYKEAVDQLGYDTSGLKKEKRSKFLPPISDEITNPIVKRALTQARKVVNAIIRRHGSPHSVHIELARELSKNHDERTKIVSAQDENYKKNKGAISILSEHGILNPTGYDIVRYKLWKEQGERCAYSLKEIPADTFFNELKKERNGAPILEVDHILPYSQSFIDSYHNKVLVYSDENRKKGNRIPYTYFLETNKDWEAFERYVRSNKFFSKKKREYLLKRAYLPRESELIKERHLNDTRYASTFLKNFIEQNLQFKEAEDNPRKRRVQTVNGVITAHFRKRWGLEKDRQETYLHHAMDAIIVACTDHHMVTRVTEYYQIKESGGSSNPEFTHEYWMRHALTLARRARDEGEVPVGAVLVLNNQVIGEGWNRAIGLHDPTAHAEIMALRQGGLVLQNYRLIDTTLYSTFEPCVMCSGAMVHSRIGTLVFGVRNSKRGAAGSLMNVLNYPGMNHQVKTIGGVLAPECSGLLCDFYRMPRQVFNQQKAELKSINDSGGNKSVKKPYFPMPWEGFRDELLSHLASQPIAKKISEELKAGYQSLDYIFVSRMPKRSITGAAHKQTIMRKGGIDKKGKTIIIERLHLKDIKFDENGDFKMVGKEQDMATYEAIKQRYLEHGKNSKKAFETPLYKPSKKGTGNLIKRVKVEGQAKSFVREVNGGVAQNGDLVRVDLFEKDDKYYMVPIYVPDTVCSELPKKVVASSKGYEQWLTLDNSFTFKFSLYPYDLVRLVKGDEDRFLYFGTLDIDSDRLNFKDVNKPSKKNEYRYSLKTIEDLEKYEVGVLGDLRLVRKETRRNFHSGGSKRPAATKKAGQAKKKK

SEQ ID NO: 596 - protein, 167 aa, synthetic construct; identical to SEQ ID NO: 404
  REGION 1..167: note = LPG50320

SEQ ID NO: 597 - protein, 167 aa, synthetic construct
  REGION 1..167: note = LPG50324
SNPEFTHEYWMRHALTLARRARDEGEVPVGAVLVLNNQVIGEGWNRAIGLHDPTAHAEIMALRQGGLVLQNYRLYDTTLYSTFEPCVMCSGAMVHSRIGTLVFGVRNSKRGAAGSLLNVLGYPGMNHQVKTIGGVLAPECSGLLLDFYRMPRQVWNQQKDELKSIND

SEQ ID NO: 598 - protein, 167 aa, synthetic construct
  REGION 1..167: note = LPG50318
SNPEFTHEYWMRHALTLARRARDEGEVPVGAVLVLNNQVIGEGWNRAIGLHDPTAHAEIMALRQGGLVLQNYRLIDTTLYSTFEPCVMCSGAMVHSRIGTLVFGVRNSKRGAAGSLMNVLNYPGMNHQVKTIGGVLVPECSGLLCDFYRMPRQVFNQQKAELKSIND

SEQ ID NO: 599 - protein, 1363 aa, synthetic construct
  REGION 1..1363: note = LPG20061
MAPKKKRKVGSSGGSSGYSIGLALGISSVGWSVIDEETGKIVDLGVRLFSAKNSEKNLERRTSRGARRLIRRKTNRLKDAKKLLEAIGFYEDKALKNVCPYQLRVKGLTEGLTKGELYKVVLHIVKKRGISYLDEDDAEAAKESQDYKEQVRKNAQLLTKYTPGQIQLQRLKENNRVKTGINGQGHYQLNVFKVSAYADELATILKTQQALYPNELTDDWIALFVQPGIAENAGLIYRKRPYYHGPGNEANNSPYGRWSDFQKTGQPAANIFDKLIGKDFQGELRASGLSLSAQQYNLLNDLTNLKIDGEVSLSPEQKEFILTELMTKEFARFGVNDIAKLLGVKKEQLSGWRLDKKGKPEIHTLKGYRNWRKIFAEAGIDLATLPTETIDCLAKVLTLNTEREGVENTLAFELPELAEPVKSLVLDHYKELSQSISTQAWHRFSLKTLHLLIPELIKSTSEQNTLLEQFQLKAGVRKRYSDYKKLPTKEVLAEIYNPTVNKTVSQAFKVMDALLEKYGKDQIHYITVEMPRDDNEEEERKRIKELQTKNSQRKNDSQQYFLQKSGWSQEKFQATIHKNRRFLAKLLYYFEQDGVCAYTGNPISPELLVSDSTEIDHIIPISISLDDSINNKVLVLSHANQVKGQQTPYDARMAGAFNKINGKFSNWDEYQKWVESRPFSRKKVNNLLETRNIFDSEQVQKFLSRNLNDTRYASRLVLNTLQSFFENQDTIVRVVNGSFTHTLRKKWGADLDKTRETHHHHAVDATLCAVTPFVKVSRYHYAVNEETGEKFMREIDVETGEILDEIPYREYKKAKHYERKTYQVKWSNFREQLKPITIHPKIKFSHQVDRKANRKLSDATIYSVREKTEVKTLKSGKEKITTDEYTIGKIKDIYTVDGWEAFKKKQDKLLMKEFDEKTYELLVTIAATTPDFQEVEEKSGGSNPEFTHEYWMRHALTLARRARDEGEVPVGAVLVLNNQVIGEGWNRAIGLHDPTAHAEIMALRQGGLVLQNYRLWDTTLYSTFEPCVMCSGAMVHSRIGTLVFGVRNSKRGAAGSLMNVLNYPGMNHQVKTIGGVLAPECSGLLCDFYRMPRQVWNQQKDELKSINDGGSNGKVKRVKRSPFAVYCEENGIPAIRKYAKKNNGPVIRSLKYYDGKLNKHINITKDEKGRPVEQTKNGRKVTLQSLKPYRYDIYQDLETKAYYTVQLYYSDLRFVEGEYGITEKEYMKKVAEQTKGQVVRFCFSLQKNDGLEIEWKDSQRYDVRFYNFQSANSINFKGLEQEMIPAENQFKQKPYNNGAINLNIAKYGKEGKKLRKFNTDILGKKHHLSYEKEPKNIIKGSSGGSSGKRPAATKKAGQAKKKK

SEQ ID NO: 600 - protein, 1343 aa, synthetic construct
  REGION 1..1343: note = LPG20062
MAPKKKRKVGSSGGSSGSKVAKNMTRVNLGFAIGIASVGWSVLDNQTGKILETGVSIFPSGSASRNEERRSFRQSRRLIRRKKARICDMDHLLKKNGFPFPGNTGANPYEIRVKGLTEKLSREELAIALHHLVKRRGISYDLKDVEDESAGGTNYQESIAVNQRLLKKETPAEIQLARLTECGKVRGQVKSLGEDNTATTLLNVFPNAAYQEEMVKLLKKQQEFYGEIDDPFMETAIGILSRKREYFIGPGSEKSRTDYGIYRTDGTTLKNLFEILVGKDKIFPDQYRAAGNSYTAQLYNLLNDLNNLEVDATEDGKLTTAHKEQIIEELTTTTGNVNMLKLIAKVAGTSPAGIKKYRVDREGKPEFHSLAIYRRLRKKLGEAGFEINEWPPEFFDDYGPIVTLNTESGELRKWLAEEGSRKYDFLTEPVIEAILANKSAFDSVGKNKWHRFSLKTMQLLIPELLHTFKEQMTILAEMGLLHENKKDYGDQNKVDVKYLTENLYNPVVRKSVKQAMDIFNALFEKYANIDYVVIEMPRDDAEDELEQKKQFQKFQLKNEKEKDASLKEFQELAGVSDLQLEAQLRKRKKLRQKIRMWYQQRGKCPYSGKTIAAVDLFHQDNQFEIDHIIPLSVSFDDGQNNKVLCYSEMNQEKGKQTPYAFMSRGGGQGFSALQAYVKSNNRLENAKKRNLLFTEDINDLEVRKRFIARNLVDTRYASRIVLNELQQFVRSKELDTRVTVIRGKLTSKLRDRWRLNKSRETHHHHAVDAAVIAVSPMLKMWEKNAEIIPLKVDENTVDLKSGEIITDQEYAAQMYELPYARFLEQMPELHKKIKFHHQVDKKMNRKVSDATLYSTRKAKVGTDKKEQEYVIGKIKDIYQFDQYKKFKKLYDGDKSKFLMQRLDPQTFAKLEKIMEDYPAKIDATQPSGGSNPEFTHEYWMRHALTLARRARDEGEVPVGAVLVLNNQVIGEGWNRAIGLHDPTAHAEIMALRQGGLVLQNYRLWDTTLYSTFEPCVMCSGAMVHSRIGTLVFGVRNSKRGAAGSLMNVLNYPGMNHQVKTIGGVLAPECSGLLCDFYRMPRQVWNQQKDELKSINDGGSNGTIKLVDISPFELYRREHGPVTKYAKKNNGPAIKSLKFYDSIVGSSVKITPKNAKGKEVILKSLKPWRTDVYYNHEKEQYEIMGIKYADLKFKGDNYGITKARYQEIKEEEGVSEESEFLFSLYRGDRIQVSNGEDKIDLLFLSRSNPAKKGYVELKPIDRNQLNGKEVVSVYGAASGGRLKKQFVKKNHTLHKVNTDILGNPFYIKKESDQPKNILDLGSSGGSSGKRPAATKKAGQAKKKK

SEQ ID NO: 601 - RNA, 23 nt, Homo sapiens
  source 1..23: mol_type = other RNA
ttgtcccacagatatccagaacc

SEQ ID NO: 602 - protein, 1363 aa, synthetic construct
  REGION 1..1363: note = LPG20063
MAPKKKRKVGSSGGSSGYSIGLALGISSVGWSVIDEETGKIVDLGVRLFSAKNSEKNLERRTSRGARRLIRRKTNRLKDAKKLLEAIGFYEDKALKNVCPYQLRVKGLTEGLTKGELYKVVLHIVKKRGISYLDEDDAEAAKESQDYKEQVRKNAQLLTKYTPGQIQLQRLKENNRVKTGINGQGHYQLNVFKVSAYADELATILKTQQALYPNELTDDWIALFVQPGIAENAGLIYRKRPYYHGPGNEANNSPYGRWSDFQKTGQPAANIFDKLIGKDFQGELRASGLSLSAQQYNLLNDLTNLKIDGEVSLSPEQKEFILTELMTKEFARFGVNDIAKLLGVKKEQLSGWRLDKKGKPEIHTLKGYRNWRKIFAEAGIDLATLPTETIDCLAKVLTLNTEREGVENTLAFELPELAEPVKSLVLDHYKELSQSISTQAWHRFSLKTLHLLIPELIKSTSEQNTLLEQFQLKAGVRKRYSDYKKLPTKEVLAEIYNPTVNKTVSQAFKVMDALLEKYGKDQIHYITVEMPRDDNEEEERKRIKELQTKNSQRKNDSQQYFLQKSGWSQEKFQATIHKNRRFLAKLLYYFEQDGVCAYTGNPISPELLVSDSTEIDHIIPISISLDDSINNKVLVLSHANQVKGQQTPYDARMAGAFNKINGKFSNWDEYQKWVESRPFSRKKVNNLLETRNIFDSEQVQKFLSRNLNDTRYASRLVLNTLQSFFENQDTIVRVVNGSFTHTLRKKWGADLDKTRETHHHHAVDATLCAVTPFVKVSRYHYAVNEETGEKFMREIDVETGEILDEIPYREYKKAKHYERKTYQVKWSNFREQLKPITIHPKIKFSHQVDRKANRKLSDATIYSVREKTEVKTLKSGKEKITTDEYTIGKIKDIYTVDGWEAFKKKQDKLLMKEFDEKTYELLVTIAATTPDFQEVEEKSGGSNPEFTHEYWMRHALTLARRARDEGEVPVGAVLVNNNQVIGEGWNRAIGLHDPTAHAEIMALRQGGLVLQNYRLIDTTLYSTFEPCVMCSGAMVHSRIGTLVFGVRNSKRGAAGSLMNVLNYPGMNHQVKTIGGVLAPECSGLLCDFYRMPRQVFRQQKAEWKSINDGGSNGKVKRVKRSPFAVYCEENGIPAIRKYAKKNNGPVIRSLKYYDGKLNKHINITKDEKGRPVEQTKNGRKVTLQSLKPYRYDIYQDLETKAYYTVQLYYSDLRFVEGEYGITEKEYMKKVAEQTKGQVVRFCFSLQKNDGLEIEWKDSQRYDVRFYNFQSANSINFKGLEQEMIPAENQFKQKPYNNGAINLNIAKYGKEGKKLRKFNTDILGKKHHLSYEKEPKNIIKGSSGGSSGKRPAATKKAGQAKKKK

SEQ ID NO: 603 - protein, 1343 aa, synthetic construct
  REGION 1..1343: note = LPG20064
MAPKKKRKVGSSGGSSGSKVAKNMTRVNLGFAIGIASVGWSVLDNQTGKILETGVSIFPSGSASRNEERRSFRQSRRLIRRKKARICDMDHLLKKNGFPFPGNTGANPYEIRVKGLTEKLSREELAIALHHLVKRRGISYDLKDVEDESAGGTNYQESIAVNQRLLKKETPAEIQLARLTECGKVRGQVKSLGEDNTATTLLNVFPNAAYQEEMVKLLKKQQEFYGEIDDPFMETAIGILSRKREYFIGPGSEKSRTDYGIYRTDGTTLKNLFEILVGKDKIFPDQYRAAGNSYTAQLYNLLNDLNNLEVDATEDGKLTTAHKEQIIEELTTTTGNVNMLKLIAKVAGTSPAGIKKYRVDREGKPEFHSLAIYRRLRKKLGEAGFEINEWPPEFFDDYGPIVTLNTESGELRKWLAEEGSRKYDFLTEPVIEAILANKSAFDSVGKNKWHRFSLKTMQLLIPELLHTFKEQMTILAEMGLLHENKKDYGDQNKVDVKYLTENLYNPVVRKSVKQAMDIFNALFEKYANIDYVVIEMPRDDAEDELEQKKQFQKFQLKNEKEKDASLKEFQELAGVSDLQLEAQLRKRKKLRQKIRMWYQQRGKCPYSGKTIAAVDLFHQDNQFEIDHIIPLSVSFDDGQNNKVLCYSEMNQEKGKQTPYAFMSRGGGQGFSALQAYVKSNNRLENAKKRNLLFTEDINDLEVRKRFIARNLVDTRYASRIVLNELQQFVRSKELDTRVTVIRGKLTSKLRDRWRLNKSRETHHHHAVDAAVIAVSPMLKMWEKNAEIIPLKVDENTVDLKSGEIITDQEYAAQMYELPYARFLEQMPELHKKIKFHHQVDKKMNRKVSDATLYSTRKAKVGTDKKEQEYVIGKIKDIYQFDQYKKFKKLYDGDKSKFLMQRLDPQTFAKLEKIMEDYPAKIDATQPSGGSNPEFTHEYWMRHALTLARRARDEGEVPVGAVLVNNNQVIGEGWNRAIGLHDPTAHAEIMALRQGGLVLQNYRLIDTTLYSTFEPCVMCSGAMVHSRIGTLVFGVRNSKRGAAGSLMNVLNYPGMNHQVKTIGGVLAPECSGLLCDFYRMPRQVFRQQKAEWKSINDGGSNGTIKLVDISPFELYRREHGPVTKYAKKNNGPAIKSLKFYDSIVGSSVKITPKNAKGKEVILKSLKPWRTDVYYNHEKEQYEIMGIKYADLKFKGDNYGITKARYQEIKEEEGVSEESEFLFSLYRGDRIQVSNGEDKIDLLFLSRSNPAKKGYVELKPIDRNQLNGKEVVSVYGAASGGRLKKQFVKKNHTLHKVNTDILGNPFYIKKESDQPKNILDLGSSGGSSGKRPAATKKAGQAKKKK

SEQ ID NO: 604 - protein, 1310 aa, synthetic construct
  REGION 1..1310: note = LPG20065
MAPKKKRKVGSSGGSSGSNPEFTHEYWMRHALTLARRARDEGEVPVGAVLVLNNQVIGEGWNRAIGLHDPTAHAEIMALRQGGLALQNYRLIDTTLYSTFEPCVMCSGAMVHSRIGTLVFGVRNSKRGAAGSLMNVLNYPGMNHQVKTIGGVLAPECSGLLCDFYRMPRQVFNQQKAELKSINDSGGSSGGSSGSETPGTSESATPESSGGSSGGSRELDYRIGLAIGTNSIGWGVIELSWNKDRERYEKVRIVDQGVRMFDRAEMPKTGASLAEPRRIARSSRRRLNRKSQRKKNIRNLLVQHGVITQEELDSLYPLSKKSMDIWGIRLDGLDRLLNHFEWARLLIHLAQRRGFKSNRKSELKDTETGKVLSSIQLNEKRLSLYRTVGEMWMKDPDFSKYDRKRNSPNEYVFSVSRAELEKEIVTLFAAQRRFQSPYASKDLQETYLQIWTHQLPFASGNAILNKVGYCSLLKGKERRIPKATYTFQYFSALDQVNRTRLGPDFQPFTKEQREIILNNMFQRTDYYKKKTIPEVTYYDIRKWLELDETIQFKGLNYDPNEELKKIEKKPFINLKAFYEINKVVANYSERTNETFSTLDYDGIGYALTVYKTDKDIRSYLKSSHNLPKRCYDDQLIEELLSLSYTKFGHLSLKAINHVLSIMQKGNTYKEAVDQLGYDTSGLKKEKRSKFLPPISDEITNPIVKRALTQARKVVNAIIRRHGSPHSVHIELARELSKNHDERTKIVSAQDENYKKNKGAISILSEHGILNPTGYDIVRYKLWKEQGERCAYSLKEIPADTFFNELKKERNGAPILEVDHILPYSQSFIDSYHNKVLVYSDENRKKGNRIPYTYFLETNKDWEAFERYVRSNKFFSKKKREYLLKRAYLPRESELIKERHLNDTRYASTFLKNFIEQNLQFKEAEDNPRKRRVQTVNGVITAHFRKRWGLEKDRQETYLHHAMDAIIVACTDHHMVTRVTEYYQIKESNKSVKKPYFPMPWEGFRDELLSHLASQPIAKKISEELKAGYQSLDYIFVSRMPKRSITGAAHKQTIMRKGGIDKKGKTIIIERLHLKDIKFDENGDFKMVGKEQDMATYEAIKQRYLEHGKNSKKAFETPLYKPSKKGTGNLIKRVKVEGQAKSFVREVNGGVAQNGDLVRVDLFEKDDKYYMVPIYVPDTVCSELPKKVVASSKGYEQWLTLDNSFTFKFSLYPYDLVRLVKGDEDRFLYFGTLDIDSDRLNFKDVNKPSKKNEYRYSLKTIEDLEKYEVGVLGDLRLVRKETRRNFHGSSGGSSGKRPAATKKAGQAKKKK

SEQ ID NO: 605 - protein, 1310 aa, synthetic construct
  REGION 1..1310: note = LPG20066
MAPKKKRKVGSSGGSSGSNPEFTHEYWMRHALTLARRARDEGEVPVGAVLVLNNQVIGEGWNRAIGLHDPTAHAEIMALRQGGLVLQNYRLYDTTLYSTFEPCVMCSGAMVHSRIGTLVFGVRNSKRGAAGSLLNVLGYPGMNHQVKTIGGVLAPECSGLLLDFYRMPRQVWNQQKDELKSINDSGGSSGGSSGSETPGTSESATPESSGGSSGGSRELDYRIGLAIGTNSIGWGVIELSWNKDRERYEKVRIVDQGVRMFDRAEMPKTGASLAEPRRIARSSRRRLNRKSQRKKNIRNLLVQHGVITQEELDSLYPLSKKSMDIWGIRLDGLDRLLNHFEWARLLIHLAQRRGFKSNRKSELKDTETGKVLSSIQLNEKRLSLYRTVGEMWMKDPDFSKYDRKRNSPNEYVFSVSRAELEKEIVTLFAAQRRFQSPYASKDLQETYLQIWTHQLPFASGNAILNKVGYCSLLKGKERRIPKATYTFQYFSALDQVNRTRLGPDFQPFTKEQREIILNNMFQRTDYYKKKTIPEVTYYDIRKWLELDETIQFKGLNYDPNEELKKIEKKPFINLKAFYEINKVVANYSERTNETFSTLDYDGIGYALTVYKTDKDIRSYLKSSHNLPKRCYDDQLIEELLSLSYTKFGHLSLKAINHVLSIMQKGNTYKEAVDQLGYDTSGLKKEKRSKFLPPISDEITNPIVKRALTQARKVVNAIIRRHGSPHSVHIELARELSKNHDERTKIVSAQDENYKKNKGAISILSEHGILNPTGYDIVRYKLWKEQGERCAYSLKEIPADTFFNELKKERNGAPILEVDHILPYSQSFIDSYHNKVLVYSDENRKKGNRIPYTYFLETNKDWEAFERYVRSNKFFSKKKREYLLKRAYLPRESELIKERHLNDTRYASTFLKNFIEQNLQFKEAEDNPRKRRVQTVNGVITAHFRKRWGLEKDRQETYLHHAMDAIIVACTDHHMVTRVTEYYQIKESNKSVKKPYFPMPWEGFRDELLSHLASQPIAKKISEELKAGYQSLDYIFVSRMPKRSITGAAHKQTIMRKGGIDKKGKTIIIERLHLKDIKFDENGDFKMVGKEQDMATYEAIKQRYLEHGKNSKKAFETPLYKPSKKGTGNLIKRVKVEGQAKSFVREVNGGVAQNGDLVRVDLFEKDDKYYMVPIYVPDTVCSELPKKVVASSKGYEQWLTLDNSFTFKFSLYPYDLVRLVKGDEDRFLYFGTLDIDSDRLNFKDVNKPSKKNEYRYSLKTIEDLEKYEVGVLGDLRLVRKETRRNFHGSSGGSSGKRPAATKKAGQAKKKK

SEQ ID NO: 606 - protein, 1285 aa, synthetic construct
  REGION 1..1285: note = LPG20067
MAPKKKRKVGSSGGSSGMRELDYRIGLAIGTNSIGWGVIELSWNKDRERYEKVRIVDQGVRMFDRAEMPKTGASLAEPRRIARSSRRRLNRKSQRKKNIRNLLVQHGVITQEELDSLYPLSKKSMDIWGIRLDGLDRLLNHFEWARLLIHLAQRRGFKSNRKSELKDTETGKVLSSIQLNEKRLSLYRTVGEMWMKDPDFSKYDRKRNSPNEYVFSVSRAELEKEIVTLFAAQRRFQSPYASKDLQETYLQIWTHQLPFASGNAILNKVGYCSLLKGKERRIPKATYTFQYFSALDQVNRTRLGPDFQPFTKEQREIILNNMFQRTDYYKKKTIPEVTYYDIRKWLELDETIQFKGLNYDPNEELKKIEKKPFINLKAFYEINKVVANYSERTNETFSTLDYDGIGYALTVYKTDKDIRSYLKSSHNLPKRCYDDQLIEELLSLSYTKFGHLSLKAINHVLSIMQKGNTYKEAVDQLGYDTSGLKKEKRSKFLPPISDEITNPIVKRALTQARKVVNAIIRRHGSPHSVHIELARELSKNHDERTKIVSAQDENYKKNKGAISILSEHGILNPTGYDIVRYKLWKEQGERCAYSLKEIPADTFFNELKKERNGAPILEVDHILPYSQSFIDSYHNKVLVYSDENRKKGNRIPYTYFLETNKDWEAFERYVRSNKFFSKKKREYLLKRAYLPRESELIKERHLNDTRYASTFLKNFIEQNLQFKEAEDNPRKRRVQTVNGVITAHFRKRWGLEKDRQETYLHHAMDAIIVACTDHHMVTRVTEYYQIKESGGSSNPEFTHEYWMRHALTLARRARDEGEVPVGAVLVLNNQVIGEGWNRAIGLHDPTAHAEIMALRQGGLVLQNYRLWDTTLYSTFEPCVMCSGAMVHSRIGTLVFGVRNSKRGAAGSLMNVLNYPGMNHQVKTIGGVLAPECSGLLCDFYRMPRQVWNQQKDELKSINDSGGNKSVKKPYFPMPWEGFRDELLSHLASQPIAKKISEELKAGYQSLDYIFVSRMPKRSITGAAHKQTIMRKGGIDKKGKTIIIERLHLKDIKFDENGDFKMVGKEQDMATYEAIKQRYLEHGKNSKKAFETPLYKPSKKGTGNLIKRVKVEGQAKSFVREVNGGVAQNGDLVRVDLFEKDDKYYMVPIYVPDTVCSELPKKVVASSKGYEQWLTLDNSFTFKFSLYPYDLVRLVKGDEDRFLYFGTLDIDSDRLNFKDVNKPSKKNEYRYSLKTIEDLEKYEVGVLGDLRLVRKETRRNFHGSSGGSSGKRPAATKKAGQAKKKK

SEQ ID NO: 607 - protein, 1369 aa, synthetic construct
  REGION 1..1369: note = LPG20068
MAPKKKRKVGSSGGSSGSNPEFTHEYWMRHALTLARRARDEGEVPVGAVLVNNNQVIGEGWNRAIGLHDPTAHAEIMALRQGGLVLQNYRLIDTTLYSTFEPCVMCSGAMVHSRIGTLVFGVRNSKRGAAGSLMNVLNYPGMNHQVKTIGGVLAPECSGLLCDFYRMPRQVFRQQKAEWKSINDSGGSSGGSSGSETPGTSESATPESSGGSSGGSSKVAKNMTRVNLGFAIGIASVGWSVLDNQTGKILETGVSIFPSGSASRNEERRSFRQSRRLIRRKKARICDMDHLLKKNGFPFPGNTGANPYEIRVKGLTEKLSREELAIALHHLVKRRGISYDLKDVEDESAGGTNYQESIAVNQRLLKKETPAEIQLARLTECGKVRGQVKSLGEDNTATTLLNVFPNAAYQEEMVKLLKKQQEFYGEIDDPFMETAIGILSRKREYFIGPGSEKSRTDYGIYRTDGTTLKNLFEILVGKDKIFPDQYRAAGNSYTAQLYNLLNDLNNLEVDATEDGKLTTAHKEQIIEELTTTTGNVNMLKLIAKVAGTSPAGIKKYRVDREGKPEFHSLAIYRRLRKKLGEAGFEINEWPPEFFDDYGPIVTLNTESGELRKWLAEEGSRKYDFLTEPVIEAILANKSAFDSVGKNKWHRFSLKTMQLLIPELLHTFKEQMTILAEMGLLHENKKDYGDQNKVDVKYLTENLYNPVVRKSVKQAMDIFNALFEKYANIDYVVIEMPRDDAEDELEQKKQFQKFQLKNEKEKDASLKEFQELAGVSDLQLEAQLRKRKKLRQKIRMWYQQRGKCPYSGKTIAAVDLFHQDNQFEIDHIIPLSVSFDDGQNNKVLCYSEMNQEKGKQTPYAFMSRGGGQGFSALQAYVKSNNRLENAKKRNLLFTEDINDLEVRKRFIARNLVDTRYASRIVLNELQQFVRSKELDTRVTVIRGKLTSKLRDRWRLNKSRETHHHHAVDAAVIAVSPMLKMWEKNAEIIPLKVDENTVDLKSGEIITDQEYAAQMYELPYARFLEQMPELHKKIKFHHQVDKKMNRKVSDATLYSTRKAKVGTDKKEQEYVIGKIKDIYQFDQYKKFKKLYDGDKSKFLMQRLDPQTFAKLEKIMEDYPAKIDATQPNGTIKLVDISPFELYRREHGPVTKYAKKNNGPAIKSLKFYDSIVGSSVKITPKNAKGKEVILKSLKPWRTDVYYNHEKEQYEIMGIKYADLKFKGDNYGITKARYQEIKEEEGVSEESEFLFSLYRGDRIQVSNGEDKIDLLFLSRSNPAKKGYVELKPIDRNQLNGKEVVSVYGAASGGRLKKQFVKKNHTLHKVNTDILGNPFYIKKESDQPKNILDLGSSGGSSGKRPAATKKAGQAKKKK

SEQ ID NO: 608 - protein, 1389 aa, synthetic construct
  REGION 1..1389: note = LPG20069
MAPKKKRKVGSSGGSSGSNPEFTHEYWMRHALTLARRARDEGEVPVGAVLVLNNQVIGEGWNRAIGLHDPTAHAEIMALRQGGLVLQNYRLWDTTLYSTFEPCVMCSGAMVHSRIGTLVFGVRNSKRGAAGSLMNVLNYPGMNHQVKTIGGVLAPECSGLLCDFYRMPRQVWNQQKDELKSINDSGGSSGGSSGSETPGTSESATPESSGGSSGGSYSIGLALGISSVGWSVIDEETGKIVDLGVRLFSAKNSEKNLERRTSRGARRLIRRKTNRLKDAKKLLEAIGFYEDKALKNVCPYQLRVKGLTEGLTKGELYKVVLHIVKKRGISYLDEDDAEAAKESQDYKEQVRKNAQLLTKYTPGQIQLQRLKENNRVKTGINGQGHYQLNVFKVSAYADELATILKTQQALYPNELTDDWIALFVQPGIAENAGLIYRKRPYYHGPGNEANNSPYGRWSDFQKTGQPAANIFDKLIGKDFQGELRASGLSLSAQQYNLLNDLTNLKIDGEVSLSPEQKEFILTELMTKEFARFGVNDIAKLLGVKKEQLSGWRLDKKGKPEIHTLKGYRNWRKIFAEAGIDLATLPTETIDCLAKVLTLNTEREGVENTLAFELPELAEPVKSLVLDHYKELSQSISTQAWHRFSLKTLHLLIPELIKSTSEQNTLLEQFQLKAGVRKRYSDYKKLPTKEVLAEIYNPTVNKTVSQAFKVMDALLEKYGKDQIHYITVEMPRDDNEEEERKRIKELQTKNSQRKNDSQQYFLQKSGWSQEKFQATIHKNRRFLAKLLYYFEQDGVCAYTGNPISPELLVSDSTEIDHIIPISISLDDSINNKVLVLSHANQVKGQQTPYDARMAGAFNKINGKFSNWDEYQKWVESRPFSRKKVNNLLETRNIFDSEQVQKFLSRNLNDTRYASRLVLNTLQSFFENQDTIVRVVNGSFTHTLRKKWGADLDKTRETHHHHAVDATLCAVTPFVKVSRYHYAVNEETGEKFMREIDVETGEILDEIPYREYKKAKHYERKTYQVKWSNFREQLKPITIHPKIKFSHQVDRKANRKLSDATIYSVREKTEVKTLKSGKEKITTDEYTIGKIKDIYTVDGWEAFKKKQDKLLMKEFDEKTYELLVTIAATTPDFQEVEEKNGKVKRVKRSPFAVYCEENGIPAIRKYAKKNNGPVIRSLKYYDGKLNKHINITKDEKGRPVEQTKNGRKVTLQSLKPYRYDIYQDLETKAYYTVQLYYSDLRFVEGEYGITEKEYMKKVAEQTKGQVVRFCFSLQKNDGLEIEWKDSQRYDVRFYNFQSANSINFKGLEQEMIPAENQFKQKPYNNGAINLNIAKYGKEGKKLRKFNTDILGKKHHLSYEKEPKNIIKGSSGGSSGKRPAATKKAGQAKKKK

SEQ ID NO: 609 - protein, 1389 aa, synthetic construct
  REGION 1..1389: note = LPG20070
MAPKKKRKVGSSGGSSGSNPEFTHEYWMRHALTLARRARDEGEVPVGAVLVLNNQVIGEGWNRAIGLHDPTAHAEIMALRQGGLVLQNYRLYDTTLYSTFEPCVMCSGAMVHSRIGTLVFGVRNSKRGAAGSLLNVLGYPGMNHQVKTIGGVLAPECSGLLLDFYRMPRQVWNQQKDELKSINDSGGSSGGSSGSETPGTSESATPESSGGSSGGSYSIGLALGISSVGWSVIDEETGKIVDLGVRLFSAKNSEKNLERRTSRGARRLIRRKTNRLKDAKKLLEAIGFYEDKALKNVCPYQLRVKGLTEGLTKGELYKVVLHIVKKRGISYLDEDDAEAAKESQDYKEQVRKNAQLLTKYTPGQIQLQRLKENNRVKTGINGQGHYQLNVFKVSAYADELATILKTQQALYPNELTDDWIALFVQPGIAENAGLIYRKRPYYHGPGNEANNSPYGRWSDFQKTGQPAANIFDKLIGKDFQGELRASGLSLSAQQYNLLNDLTNLKIDGEVSLSPEQKEFILTELMTKEFARFGVNDIAKLLGVKKEQLSGWRLDKKGKPEIHTLKGYRNWRKIFAEAGIDLATLPTETIDCLAKVLTLNTEREGVENTLAFELPELAEPVKSLVLDHYKELSQSISTQAWHRFSLKTLHLLIPELIKSTSEQNTLLEQFQLKAGVRKRYSDYKKLPTKEVLAEIYNPTVNKTVSQAFKVMDALLEKYGKDQIHYITVEMPRDDNEEEERKRIKELQTKNSQRKNDSQQYFLQKSGWSQEKFQATIHKNRRFLAKLLYYFEQDGVCAYTGNPISPELLVSDSTEIDHIIPISISLDDSINNKVLVLSHANQVKGQQTPYDARMAGAFNKINGKFSNWDEYQKWVESRPFSRKKVNNLLETRNIFDSEQVQKFLSRNLNDTRYASRLVLNTLQSFFENQDTIVRVVNGSFTHTLRKKWGADLDKTRETHHHHAVDATLCAVTPFVKVSRYHYAVNEETGEKFMREIDVETGEILDEIPYREYKKAKHYERKTYQVKWSNFREQLKPITIHPKIKFSHQVDRKANRKLSDATIYSVREKTEVKTLKSGKEKITTDEYTIGKIKDIYTVDGWEAFKKKQDKLLMKEFDEKTYELLVTIAATTPDFQEVEEKNGKVKRVKRSPFAVYCEENGIPAIRKYAKKNNGPVIRSLKYYDGKLNKHINITKDEKGRPVEQTKNGRKVTLQSLKPYRYDIYQDLETKAYYTVQLYYSDLRFVEGEYGITEKEYMKKVAEQTKGQVVRFCFSLQKNDGLEIEWKDSQRYDVRFYNFQSANSINFKGLEQEMIPAENQFKQKPYNNGAINLNIAKYGKEGKKLRKFNTDILGKKHHLSYEKEPKNIIKGSSGGSSGKRPAATKKAGQAKKKK

SEQ ID NO: 610 - protein, 1363 aa, synthetic construct
  REGION 1..1363: note = LPG20071
MAPKKKRKVGSSGGSSGYSIGLALGISSVGWSVIDEETGKIVDLGVRLFSAKNSEKNLERRTSRGARRLIRRKTNRLKDAKKLLEAIGFYEDKALKNVCPYQLRVKGLTEGLTKGELYKVVLHIVKKRGISYLDEDDAEAAKESQDYKEQVRKNAQLLTKYTPGQIQLQRLKENNRVKTGINGQGHYQLNVFKVSAYADELATILKTQQALYPNELTDDWIALFVQPGIAENAGLIYRKRPYYHGPGNEANNSPYGRWSDFQKTGQPAANIFDKLIGKDFQGELRASGLSLSAQQYNLLNDLTNLKIDGEVSLSPEQKEFILTELMTKEFARFGVNDIAKLLGVKKEQLSGWRLDKKGKPEIHTLKGYRNWRKIFAEAGIDLATLPTETIDCLAKVLTLNTEREGVENTLAFELPELAEPVKSLVLDHYKELSQSISTQAWHRFSLKTLHLLIPELIKSTSEQNTLLEQFQLKAGVRKRYSDYKKLPTKEVLAEIYNPTVNKTVSQAFKVMDALLEKYGKDQIHYITVEMPRDDNEEEERKRIKELQTKNSQRKNDSQQYFLQKSGWSQEKFQATIHKNRRFLAKLLYYFEQDGVCAYTGNPISPELLVSDSTEIDHIIPISISLDDSINNKVLVLSHANQVKGQQTPYDARMAGAFNKINGKFSNWDEYQKWVESRPFSRKKVNNLLETRNIFSGGSNPEFTHEYWMRHALTLARRARDEGEVPVGAVLVLNNQVIGEGWNRAIGLHDPTAHAEIMALRQGGLVLQNYRLWDTTLYSTFEPCVMCSGAMVHSRIGTLVFGVRNSKRGAAGSLMNVLNYPGMNHQVKTIGGVLAPECSGLLCDFYRMPRQVWNQQKDELKSINDGGSDSEQVQKFLSRNLNDTRYASRLVLNTLQSFFENQDTIVRVVNGSFTHTLRKKWGADLDKTRETHHHHAVDATLCAVTPFVKVSRYHYAVNEETGEKFMREIDVETGEILDEIPYREYKKAKHYERKTYQVKWSNFREQLKPITIHPKIKFSHQVDRKANRKLSDATIYSVREKTEVKTLKSGKEKITTDEYTIGKIKDIYTVDGWEAFKKKQDKLLMKEFDEKTYELLVTIAATTPDFQEVEEKNGKVKRVKRSPFAVYCEENGIPAIRKYAKKNNGPVIRSLKYYDGKLNKHINITKDEKGRPVEQTKNGRKVTLQSLKPYRYDIYQDLETKAYYTVQLYYSDLRFVEGEYGITEKEYMKKVAEQTKGQVVRFCFSLQKNDGLEIEWKDSQRYDVRFYNFQSANSINFKGLEQEMIPAENQFKQKPYNNGAINLNIAKYGKEGKKLRKFNTDILGKKHHLSYEKEPKNIIKGSSGGSSGKRPAATKKAGQAKKKK

SEQ ID NO: 611 - protein, 1389 aa, synthetic construct
  REGION 1..1389: note = LPG20072
MAPKKKRKVGSSGGSSGSNPEFTHEYWMRHALTLARRARDEGEVPVGAVLVNNNQVIGEGWNRAIGLHDPTAHAEIMALRQGGLVLQNYRLIDTTLYSTFEPCVMCSGAMVHSRIGTLVFGVRNSKRGAAGSLMNVLNYPGMNHQVKTIGGVLAPECSGLLCDFYRMPRQVFRQQKAEWKSINDSGGSSGGSSGSETPGTSESATPESSGGSSGGSYSIGLALGISSVGWSVIDEETGKIVDLGVRLFSAKNSEKNLERRTSRGARRLIRRKTNRLKDAKKLLEAIGFYEDKALKNVCPYQLRVKGLTEGLTKGELYKVVLHIVKKRGISYLDEDDAEAAKESQDYKEQVRKNAQLLTKYTPGQIQLQRLKENNRVKTGINGQGHYQLNVFKVSAYADELATILKTQQALYPNELTDDWIALFVQPGIAENAGLIYRKRPYYHGPGNEANNSPYGRWSDFQKTGQPAANIFDKLIGKDFQGELRASGLSLSAQQYNLLNDLTNLKIDGEVSLSPEQKEFILTELMTKEFARFGVNDIAKLLGVKKEQLSGWRLDKKGKPEIHTLKGYRNWRKIFAEAGIDLATLPTETIDCLAKVLTLNTEREGVENTLAFELPELAEPVKSLVLDHYKELSQSISTQAWHRFSLKTLHLLIPELIKSTSEQNTLLEQFQLKAGVRKRYSDYKKLPTKEVLAEIYNPTVNKTVSQAFKVMDALLEKYGKDQIHYITVEMPRDDNEEEERKRIKELQTKNSQRKNDSQQYFLQKSGWSQEKFQATIHKNRRFLAKLLYYFEQDGVCAYTGNPISPELLVSDSTEIDHIIPISISLDDSINNKVLVLSHANQVKGQQTPYDARMAGAFNKINGKFSNWDEYQKWVESRPFSRKKVNNLLETRNIFDSEQVQKFLSRNLNDTRYASRLVLNTLQSFFENQDTIVRVVNGSFTHTLRKKWGADLDKTRETHHHHAVDATLCAVTPFVKVSRYHYAVNEETGEKFMREIDVETGEILDEIPYREYKKAKHYERKTYQVKWSNFREQLKPITIHPKIKFSHQVDRKANRKLSDATIYSVREKTEVKTLKSGKEKITTDEYTIGKIKDIYTVDGWEAFKKKQDKLLMKEFDEKTYELLVTIAATTPDFQEVEEKNGKVKRVKRSPFAVYCEENGIPAIRKYAKKNNGPVIRSLKYYDGKLNKHINITKDEKGRPVEQTKNGRKVTLQSLKPYRYDIYQDLETKAYYTVQLYYSDLRFVEGEYGITEKEYMKKVAEQTKGQVVRFCFSLQKNDGLEIEWKDSQRYDVRFYNFQSANSINFKGLEQEMIPAENQFKQKPYNNGAINLNIAKYGKEGKKLRKFNTDILGKKHHLSYEKEPKNIIKGSSGGSSGKRPAATKKAGQAKKKK

SEQ ID NO: 612 - protein, 1285 aa, synthetic construct
  REGION 1..1285: note = LPG20073
MAPKKKRKVGSSGGSSGMRELDYRIGLAIGTNSIGWGVIELSWNKDRERYEKVRIVDQGVRMFDRAEMPKTGASLAEPRRIARSSRRRLNRKSQRKKNIRNLLVQHGVITQEELDSLYPLSKKSMDIWGIRLDGLDRLLNHFEWARLLIHLAQRRGFKSNRKSELKDTETGKVLSSIQLNEKRLSLYRTVGEMWMKDPDFSKYDRKRNSPNEYVFSVSRAELEKEIVTLFAAQRRFQSPYASKDLQETYLQIWTHQLPFASGNAILNKVGYCSLLKGKERRIPKATYTFQYFSALDQVNRTRLGPDFQPFTKEQREIILNNMFQRTDYYKKKTIPEVTYYDIRKWLELDETIQFKGLNYDPNEELKKIEKKPFINLKAFYEINKVVANYSERTNETFSTLDYDGIGYALTVYKTDKDIRSYLKSSHNLPKRCYDDQLIEELLSLSYTKFGHLSLKAINHVLSIMQKGNTYKEAVDQLGYDTSGLKKEKRSKFLPPISDEITNPIVKRALTQARKVVNAIIRRHGSPHSVHIELARELSKNHDERTKIVSAQDENYKKNKGAISILSEHGILNPTGYDIVRYKLWKEQGERCAYSLKEIPADTFFNELKKERNGAPILEVDHILPYSQSFIDSYHNKVLVYSDENRKKGNRIPYTYFLETNKDWEAFERYVRSNKFFSKKKREYLLKRAYLPRESELIKERHLNDTRYASTFLKNFIEQNLQFKEAEDNPRKRRVQTVNGVITAHFRKRWGLEKDRQETYLHHAMDAIIVACTDHHMVTRVTEYYQIKESGGSSNPEFTHEYWMRHALTLARRARDEGEVPVGAVLVNNNQVIGEGWNRAIGLHDPTAHAEIMALRQGGLVLQNYRLIDTTLYSTFEPCVMCSGAMVHSRIGTLVFGVRNSKRGAAGSLMNVLNYPGMNHQVKTIGGVLAPECSGLLCDFYRMPRQVFRQQKAEWKSINDSGGNKSVKKPYFPMPWEGFRDELLSHLASQPIAKKISEELKAGYQSLDYIFVSRMPKRSITGAAHKQTIMRKGGIDKKGKTIIIERLHLKDIKFDENGDFKMVGKEQDMATYEAIKQRYLEHGKNSKKAFETPLYKPSKKGTGNLIKRVKVEGQAKSFVREVNGGVAQNGDLVRVDLFEKDDKYYMVPIYVPDTVCSELPKKVVASSKGYEQWLTLDNSFTFKFSLYPYDLVRLVKGDEDRFLYFGTLDIDSDRLNFKDVNKPSKKNEYRYSLKTIEDLEKYEVGVLGDLRLVRKETRRNFHGSSGGSSGKRPAATKKAGQAKKKK

SEQ ID NO: 613 - protein, 1369 aa, synthetic construct
  REGION 1..1369: note = LPG20074
MAPKKKRKVGSSGGSSGSNPEFTHEYWMRHALTLARRARDEGEVPVGAVLVLNNQVIGEGWNRAIGLHDPTAHAEIMALRQGGLVLQNYRLWDTTLYSTFEPCVMCSGAMVHSRIGTLVFGVRNSKRGAAGSLMNVLNYPGMNHQVKTIGGVLAPECSGLLCDFYRMPRQVWNQQKDELKSINDSGGSSGGSSGSETPGTSESATPESSGGSSGGSSKVAKNMTRVNLGFAIGIASVGWSVLDNQTGKILETGVSIFPSGSASRNEERRSFRQSRRLIRRKKARICDMDHLLKKNGFPFPGNTGANPYEIRVKGLTEKLSREELAIALHHLVKRRGISYDLKDVEDESAGGTNYQESIAVNQRLLKKETPAEIQLARLTECGKVRGQVKSLGEDNTATTLLNVFPNAAYQEEMVKLLKKQQEFYGEIDDPFMETAIGILSRKREYFIGPGSEKSRTDYGIYRTDGTTLKNLFEILVGKDKIFPDQYRAAGNSYTAQLYNLLNDLNNLEVDATEDGKLTTAHKEQIIEELTTTTGNVNMLKLIAKVAGTSPAGIKKYRVDREGKPEFHSLAIYRRLRKKLGEAGFEINEWPPEFFDDYGPIVTLNTESGELRKWLAEEGSRKYDFLTEPVIEAILANKSAFDSVGKNKWHRFSLKTMQLLIPELLHTFKEQMTILAEMGLLHENKKDYGDQNKVDVKYLTENLYNPVVRKSVKQAMDIFNALFEKYANIDYVVIEMPRDDAEDELEQKKQFQKFQLKNEKEKDASLKEFQELAGVSDLQLEAQLRKRKKLRQKIRMWYQQRGKCPYSGKTIAAVDLFHQDNQFEIDHIIPLSVSFDDGQNNKVLCYSEMNQEKGKQTPYAFMSRGGGQGFSALQAYVKSNNRLENAKKRNLLFTEDINDLEVRKRFIARNLVDTRYASRIVLNELQQFVRSKELDTRVTVIRGKLTSKLRDRWRLNKSRETHHHHAVDAAVIAVSPMLKMWEKNAEIIPLKVDENTVDLKSGEIITDQEYAAQMYELPYARFLEQMPELHKKIKFHHQVDKKMNRKVSDATLYSTRKAKVGTDKKEQEYVIGKIKDIYQFDQYKKFKKLYDGDKSKFLMQRLDPQTFAKLEKIMEDYPAKIDATQPNGTIKLVDISPFELYRREHGPVTKYAKKNNGPAIKSLKFYDSIVGSSVKITPKNAKGKEVILKSLKPWRTDVYYNHEKEQYEIMGIKYADLKFKGDNYGITKARYQEIKEEEGVSEESEFLFSLYRGDRIQVSNGEDKIDLLFLSRSNPAKKGYVELKPIDRNQLNGKEVVSVYGAASGGRLKKQFVKKNHTLHKVNTDILGNPFYIKKESDQPKNILDLGSSGGSSGKRPAATKKAGQAKKKK

SEQ ID NO: 614 - protein, 1363 aa, synthetic construct
  REGION 1..1363: note = LPG20075
MAPKKKRKVGSSGGSSGYSIGLALGISSVGWSVIDEETGKIVDLGVRLFSAKNSEKNLERRTSRGARRLIRRKTNRLKDAKKLLEAIGFYEDKALKNVCPYQLRVKGLTEGLTKGELYKVVLHIVKKRGISYLDEDDAEAAKESQDYKEQVRKNAQLLTKYTPGQIQLQRLKENNRVKTGINGQGHYQLNVFKVSAYADELATILKTQQALYPNELTDDWIALFVQPGIAENAGLIYRKRPYYHGPGNEANNSPYGRWSDFQKTGQPAANIFDKLIGKDFQGELRASGLSLSAQQYNLLNDLTNLKIDGEVSLSPEQKEFILTELMTKEFARFGVNDIAKLLGVKKEQLSGWRLDKKGKPEIHTLKGYRNWRKIFAEAGIDLATLPTETIDCLAKVLTLNTEREGVENTLAFELPELAEPVKSLVLDHYKELSQSISTQAWHRFSLKTLHLLIPELIKSTSEQNTLLEQFQLKAGVRKRYSDYKKLPTKEVLAEIYNPTVNKTVSQAFKVMDALLEKYGKDQIHYITVEMPRDDNEEEERKRIKELQTKNSQRKNDSQQYFLQKSGWSQEKFQATIHKNRRFLAKLLYYFEQDGVCAYTGNPISPELLVSDSTEIDHIIPISISLDDSINNKVLVLSHANQVKGQQTPYDARMAGAFNKINGKFSNWDEYQKWVESRPFSRKKVNNLLETRNIFDSEQVQKFLSRNLNDTRYASRLVLNTLQSFFENQDTIVRVVNGSFTHTLRKKWGADLDKTRETHHHHAVDATLCAVTPFVKVSRYHYAVNEETGEKFMREIDVETGEILDEIPYREYKKAKHYERKTYQVKWSNFREQLKPITIHPKIKFSHQVDRKANRKLSDATIYSVREKTEVKTLKSGKEKITTDEYTIGKIKDIYTVDGWEAFKKKQDKLLMKEFDEKTYELLVTIAATTPDFQEVEEKSGGSNPEFTHEYWMRHALTLARRARDEGEVPVGAVLVLNNQVIGEGWNRAIGLHDPTAHAEIMALRQGGLVLQNYRLYDTTLYSTFEPCVMCSGAMVHSRIGTLVFGVRNSKRGAAGSLLNVLGYPGMNHQVKTIGGVLAPECSGLLLDFYRMPRQVWNQQKDELKSINDGGSNGKVKRVKRSPFAVYCEENGIPAIRKYAKKNNGPVIRSLKYYDGKLNKHINITKDEKGRPVEQTKNGRKVTLQSLKPYRYDIYQDLETKAYYTVQLYYSDLRFVEGEYGITEKEYMKKVAEQTKGQVVRFCFSLQKNDGLEIEWKDSQRYDVRFYNFQSANSINFKGLEQEMIPAENQFKQKPYNNGAINLNIAKYGKEGKKLRKFNTDILGKKHHLSYEKEPKNIIKGSSGGSSGKRPAATKKAGQAKKKK

SEQ ID NO: 615 - protein, 1363 aa, synthetic construct
  REGION 1..1363: note = LPG20076
MAPKKKRKVGSSGGSSGYSIGLALGISSVGWSVIDEETGKIVDLGVRLFSAKNSEKNLERRTSRGARRLIRRKTNRLKDAKKLLEAIGFYEDKALKNVCPYQLRVKGLTEGLTKGELYKVVLHIVKKRGISYLDEDDAEAAKESQDYKEQVRKNAQLLTKYTPGQIQLQRLKENNRVKTGINGQGHYQLNVFKVSAYADELATILKTQQALYPNELTDDWIALFVQPGIAENAGLIYRKRPYYHGPGNEANNSPYGRWSDFQKTGQPAANIFDKLIGKDFQGELRASGLSLSAQQYNLLNDLTNLKIDGEVSLSPEQKEFILTELMTKEFARFGVNDIAKLLGVKKEQLSGWRLDKKGKPEIHTLKGYRNWRKIFAEAGIDLATLPTETIDCLAKVLTLNTEREGVENTLAFELPELAEPVKSLVLDHYKELSQSISTQAWHRFSLKTLHLLIPELIKSTSEQNTLLEQFQLKAGVRKRYSDYKKLPTKEVLAEIYNPTVNKTVSQAFKVMDALLEKYGKDQIHYITVEMPRDDNEEEERKRIKELQTKNSQRKNDSQQYFLQKSGWSQEKFQATIHKNRRFLAKLLYYFEQDGVCAYTGNPISPELLVSDSTEIDHIIPISISLDDSINNKVLVLSHANQVKGQQTPYDARMAGAFNKINGKFSNWDEYQKWVESRPFSRKKVNNLLETRNIFSGGSNPEFTHEYWMRHALTLARRARDEGEVPVGAVLVNNNQVIGEGWNRAIGLHDPTAHAEIMALRQGGLVLQNYRLIDTTLYSTFEPCVMCSGAMVHSRIGTLVFGVRNSKRGAAGSLMNVLNYPGMNHQVKTIGGVLAPECSGLLCDFYRMPRQVFRQQKAEWKSINDGGSDSEQVQKFLSRNLNDTRYASRLVLNTLQSFFENQDTIVRVVNGSFTHTLRKKWGADLDKTRETHHHHAVDATLCAVTPFVKVSRYHYAVNEETGEKFMREIDVETGEILDEIPYREYKKAKHYERKTYQVKWSNFREQLKPITIHPKIKFSHQVDRKANRKLSDATIYSVREKTEVKTLKSGKEKITTDEYTIGKIKDIYTVDGWEAFKKKQDKLLMKEFDEKTYELLVTIAATTPDFQEVEEKNGKVKRVKRSPFAVYCEENGIPAIRKYAKKNNGPVIRSLKYYDGKLNKHINITKDEKGRPVEQTKNGRKVTLQSLKPYRYDIYQDLETKAYYTVQLYYSDLRFVEGEYGITEKEYMKKVAEQTKGQVVRFCFSLQKNDGLEIEWKDSQRYDVRFYNFQSANSINFKGLEQEMIPAENQFKQKPYNNGAINLNIAKYGKEGKKLRKFNTDILGKKHHLSYEKEPKNIIKGSSGGSSGKRPAATKKAGQAKKKK

SEQ ID NO: 616 - protein, 1310 aa, synthetic construct
  REGION 1..1310: note = LPG20077
MAPKKKRKVGSSGGSSGSNPEFTHEYWMRHALTLARRARDEGEVPVGAVLVLNNQVIGEGWNRAIGLHDPTAHAEIMALRQGGLVLQNYRLIDTTLYSTFEPCVMCSGAMVHSRIGTLVFGVRNSKRGAAGSLLNVLNYPGMNHQVKTIGGVLAPECSGLLCDFYRMPRQVFNQQKAELKSINDSGGSSGGSSGSETPGTSESATPESSGGSSGGSRELDYRIGLAIGTNSIGWGVIELSWNKDRERYEKVRIVDQGVRMFDRAEMPKTGASLAEPRRIARSSRRRLNRKSQRKKNIRNLLVQHGVITQEELDSLYPLSKKSMDIWGIRLDGLDRLLNHFEWARLLIHLAQRRGFKSNRKSELKDTETGKVLSSIQLNEKRLSLYRTVGEMWMKDPDFSKYDRKRNSPNEYVFSVSRAELEKEIVTLFAAQRRFQSPYASKDLQETYLQIWTHQLPFASGNAILNKVGYCSLLKGKERRIPKATYTFQYFSALDQVNRTRLGPDFQPFTKEQREIILNNMFQRTDYYKKKTIPEVTYYDIRKWLELDETIQFKGLNYDPNEELKKIEKKPFINLKAFYEINKVVANYSERTNETFSTLDYDGIGYALTVYKTDKDIRSYLKSSHNLPKRCYDDQLIEELLSLSYTKFGHLSLKAINHVLSIMQKGNTYKEAVDQLGYDTSGLKKEKRSKFLPPISDEITNPIVKRALTQARKVVNAIIRRHGSPHSVHIELARELSKNHDERTKIVSAQDENYKKNKGAISILSEHGILNPTGYDIVRYKLWKEQGERCAYSLKEIPADTFFNELKKERNGAPILEVDHILPYSQSFIDSYHNKVLVYSDENRKKGNRIPYTYFLETNKDWEAFERYVRSNKFFSKKKREYLLKRAYLPRESELIKERHLNDTRYASTFLKNFIEQNLQFKEAEDNPRKRRVQTVNGVITAHFRKRWGLEKDRQETYLHHAMDAIIVACTDHHMVTRVTEYYQIKESNKSVKKPYFPMPWEGFRDELLSHLASQPIAKKISEELKAGYQSLDYIFVSRMPKRSITGAAHKQTIMRKGGIDKKGKTIIIERLHLKDIKFDENGDFKMVGKEQDMATYEAIKQRYLEHGKNSKKAFETPLYKPSKKGTGNLIKRVKVEGQAKSFVREVNGGVAQNGDLVRVDLFEKDDKYYMVPIYVPDTVCSELPKKVVASSKGYEQWLTLDNSFTFKFSLYPYDLVRLVKGDEDRFLYFGTLDIDSDRLNFKDVNKPSKKNEYRYSLKTIEDLEKYEVGVLGDLRLVRKETRRNFHGSSGGSSGKRPAATKKAGQAKKKK

SEQ ID NO: 617 - protein, 1363 aa, synthetic construct
  REGION 1..1363: note = LPG20083
MAPKKKRKVGSSGGSSGYSIGLALGISSVGWSVIDEETGKIVDLGVRLFSAKNSEKNLERRTSRGARRLIRRKTNRLKDAKKLLEAIGFYEDKALKNVCPYQLRVKGLTEGLTKGELYKVVLHIVKKRGISYLDEDDAEAAKESQDYKEQVRKNAQLLTKYTPGQIQLQRLKENNRVKTGINGQGHYQLNVFKVSAYADELATILKTQQALYPNELTDDWIALFVQPGIAENAGLIYRKRPYYHGPGNEANNSPYGRWSDFQKTGQPAANIFDKLIGKDFQGELRASGLSLSAQQYNLLNDLTNLKIDGEVSLSPEQKEFILTELMTKEFARFGVNDIAKLLGVKKEQLSGWRLDKKGKPEIHTLKGYRNWRKIFAEAGIDLATLPTETIDCLAKVLTLNTEREGVENTLAFELPELAEPVKSLVLDHYKELSQSISTQAWHRFSLKTLHLLIPELIKSTSEQNTLLEQFQLKAGVRKRYSDYKKLPTKEVLAEIYNPTVNKTVSQAFKVMDALLEKYGKDQIHYITVEMPRDDNEEEERKRIKELQTKNSQRKNDSQQYFLQKSGWSQEKFQATIHKNRRFLAKLLYYFEQDGVCAYTGNPISPELLVSDSTEIDHIIPISISLDDSINNKVLVLSHANQVKGQQTPYDARMAGAFNKINGKFSNWDEYQKWVESRPFSRKKVNNLLETRNIFSGGSNPEFTHEYWMRHALTLARRARDEGEVPVGAVLVLNNQVIGEGWNRAIGLHDPTAHAEIMALRQGGLVLQNYRLIDTTLYSTFEPCVMCSGAMVHSRIGTLVFGVRNSKRGAAGSLLNVLNYPGMNHQVKTIGGVLAPECSGLLCDFYRMPRQVFNQQKAELKSINDGGSDSEQVQKFLSRNLNDTRYASRLVLNTLQSFFENQDTIVRVVNGSFTHTLRKKWGADLDKTRETHHHHAVDATLCAVTPFVKVSRYHYAVNEETGEKFMREIDVETGEILDEIPYREYKKAKHYERKTYQVKWSNFREQLKPITIHPKIKFSHQVDRKANRKLSDATIYSVREKTEVKTLKSGKEKITTDEYTIGKIKDIYTVDGWEAFKKKQDKLLMKEFDEKTYELLVTIAATTPDFQEVEEKNGKVKRVKRSPFAVYCEENGIPAIRKYAKKNNGPVIRSLKYYDGKLNKHINITKDEKGRPVEQTKNGRKVTLQSLKPYRYDIYQDLETKAYYTVQLYYSDLRFVEGEYGITEKEYMKKVAEQTKGQVVRFCFSLQKNDGLEIEWKDSQRYDVRFYNFQSANSINFKGLEQEMIPAENQFKQKPYNNGAINLNIAKYGKEGKKLRKFNTDILGKKHHLSYEKEPKNIIKGSSGGSSGKRPAATKKAGQAKKKK

SEQ ID NO: 618 - protein, 1369 aa, synthetic construct
  REGION 1..1369: note = LPG20084
MAPKKKRKVGSSGGSSGSNPEFTHEYWMRHALTLARRARDEGEVPVGAVLVLNNQVIGEGWNRAIGLHDPTAHAEIMALRQGGLALQNYRLIDTTLYSTFEPCVMCSGAMVHSRIGTLVFGVRNSKRGAAGSLMNVLNYPGMNHQVKTIGGVLAPECSGLLCDFYRMPRQVFNQQKAELKSINDSGGSSGGSSGSETPGTSESATPESSGGSSGGSSKVAKNMTRVNLGFAIGIASVGWSVLDNQTGKILETGVSIFPSGSASRNEERRSFRQSRRLIRRKKARICDMDHLLKKNGFPFPGNTGANPYEIRVKGLTEKLSREELAIALHHLVKRRGISYDLKDVEDESAGGTNYQESIAVNQRLLKKETPAEIQLARLTECGKVRGQVKSLGEDNTATTLLNVFPNAAYQEEMVKLLKKQQEFYGEIDDPFMETAIGILSRKREYFIGPGSEKSRTDYGIYRTDGTTLKNLFEILVGKDKIFPDQYRAAGNSYTAQLYNLLNDLNNLEVDATEDGKLTTAHKEQIIEELTTTTGNVNMLKLIAKVAGTSPAGIKKYRVDREGKPEFHSLAIYRRLRKKLGEAGFEINEWPPEFFDDYGPIVTLNTESGELRKWLAEEGSRKYDFLTEPVIEAILANKSAFDSVGKNKWHRFSLKTMQLLIPELLHTFKEQMTILAEMGLLHENKKDYGDQNKVDVKYLTENLYNPVVRKSVKQAMDIFNALFEKYANIDYVVIEMPRDDAEDELEQKKQFQKFQLKNEKEKDASLKEFQELAGVSDLQLEAQLRKRKKLRQKIRMWYQQRGKCPYSGKTIAAVDLFHQDNQFEIDHIIPLSVSFDDGQNNKVLCYSEMNQEKGKQTPYAFMSRGGGQGFSALQAYVKSNNRLENAKKRNLLFTEDINDLEVRKRFIARNLVDTRYASRIVLNELQQFVRSKELDTRVTVIRGKLTSKLRDRWRLNKSRETHHHHAVDAAVIAVSPMLKMWEKNAEIIPLKVDENTVDLKSGEIITDQEYAAQMYELPYARFLEQMPELHKKIKFHHQVDKKMNRKVSDATLYSTRKAKVGTDKKEQEYVIGKIKDIYQFDQYKKFKKLYDGDKSKFLMQRLDPQTFAKLEKIMEDYPAKIDATQPNGTIKLVDISPFELYRREHGPVTKYAKKNNGPAIKSLKFYDSIVGSSVKITPKNAKGKEVILKSLKPWRTDVYYNHEKEQYEIMGIKYADLKFKGDNYGITKARYQEIKEEEGVSEESEFLFSLYRGDRIQVSNGEDKIDLLFLSRSNPAKKGYVELKPIDRNQLNGKEVVSVYGAASGGRLKKQFVKKNHTLHKVNTDILGNPFYIKKESDQPKNILDLGSSGGSSGKRPAATKKAGQAKKKK

SEQ ID NO: 619 - protein, 1363 aa, synthetic construct
  REGION 1..1363: note = LPG20085
MAPKKKRKVGSSGGSSGYSIGLALGISSVGWSVIDEETGKIVDLGVRLFSAKNSEKNLERRTSRGARRLIRRKTNRLKDAKKLLEAIGFYEDKALKNVCPYQLRVKGLTEGLTKGELYKVVLHIVKKRGISYLDEDDAEAAKESQDYKEQVRKNAQLLTKYTPGQIQLQRLKENNRVKTGINGQGHYQLNVFKVSAYADELATILKTQQALYPNELTDDWIALFVQPGIAENAGLIYRKRPYYHGPGNEANNSPYGRWSDFQKTGQPAANIFDKLIGKDFQGELRASGLSLSAQQYNLLNDLTNLKIDGEVSLSPEQKEFILTELMTKEFARFGVNDIAKLLGVKKEQLSGWRLDKKGKPEIHTLKGYRNWRKIFAEAGIDLATLPTETIDCLAKVLTLNTEREGVENTLAFELPELAEPVKSLVLDHYKELSQSISTQAWHRFSLKTLHLLIPELIKSTSEQNTLLEQFQLKAGVRKRYSDYKKLPTKEVLAEIYNPTVNKTVSQAFKVMDALLEKYGKDQIHYITVEMPRDDNEEEERKRIKELQTKNSQRKNDSQQYFLQKSGWSQEKFQATIHKNRRFLAKLLYYFEQDGVCAYTGNPISPELLVSDSTEIDHIIPISISLDDSINNKVLVLSHANQVKGQQTPYDARMAGAFNKINGKFSNWDEYQKWVESRPFSRKKVNNLLETRNIFSGGSNPEFTHEYWMRHALTLARRARDEGEVPVGAVLVLNNQVIGEGWNRAIGLHDPTAHAEIMALRQGGLVLQNYRLYDTTLYSTFEPCVMCSGAMVHSRIGTLVFGVRNSKRGAAGSLLNVLGYPGMNHQVKTIGGVLAPECSGLLLDFYRMPRQVWNQQKDELKSINDGGSDSEQVQKFLSRNLNDTRYASRLVLNTLQSFFENQDTIVRVVNGSFTHTLRKKWGADLDKTRETHHHHAVDATLCAVTPFVKVSRYHYAVNEETGEKFMREIDVETGEILDEIPYREYKKAKHYERKTYQVKWSNFREQLKPITIHPKIKFSHQVDRKANRKLSDATIYSVREKTEVKTLKSGKEKITTDEYTIGKIKDIYTVDGWEAFKKKQDKLLMKEFDEKTYELLVTIAATTPDFQEVEEKNGKVKRVKRSPFAVYCEENGIPAIRKYAKKNNGPVIRSLKYYDGKLNKHINITKDEKGRPVEQTKNGRKVTLQSLKPYRYDIYQDLETKAYYTVQLYYSDLRFVEGEYGITEKEYMKKVAEQTKGQVVRFCFSLQKNDGLEIEWKDSQRYDVRFYNFQSANSINFKGLEQEMIPAENQFKQKPYNNGAINLNIAKYGKEGKKLRKFNTDILGKKHHLSYEKEPKNIIKGSSGGSSGKRPAATKKAGQAKKKK

SEQ ID NO: 620 - protein, 1363 aa, synthetic construct
  REGION 1..1363: note = LPG20086
MAPKKKRKVGSSGGSSGYSIGLALGISSVGWSVIDEETGKIVDLGVRLFSAKNSEKNLERRTSRGARRLIRRKTNRLKDAKKLLEAIGFYEDKALKNVCPYQLRVKGLTEGLTKGELYKVVLHIVKKRGISYLDEDDAEAAKESQDYKEQVRKNAQLLTKYTPGQIQLQRLKENNRVKTGINGQGHYQLNVFKVSAYADELATILKTQQALYPNELTDDWIALFVQPGIAENAGLIYRKRPYYHGPGNEANNSPYGRWSDFQKTGQPAANIFDKLIGKDFQGELRASGLSLSAQQYNLLNDLTNLKIDGEVSLSPEQKEFILTELMTKEFARFGVNDIAKLLGVKKEQLSGWRLDKKGKPEIHTLKGYRNWRKIFAEAGIDLATLPTETIDCLAKVLTLNTEREGVENTLAFELPELAEPVKSLVLDHYKELSQSISTQAWHRFSLKTLHLLIPELIKSTSEQNTLLEQFQLKAGVRKRYSDYKKLPTKEVLAEIYNPTVNKTVSQAFKVMDALLEKYGKDQIHYITVEMPRDDNEEEERKRIKELQTKNSQRKNDSQQYFLQKSGWSQEKFQATIHKNRRFLAKLLYYFEQDGVCAYTGNPISPELLVSDSTEIDHIIPISISLDDSINNKVLVLSHANQVKGQQTPYDARMAGAFNKINGKFSNWDEYQKWVESRPFSRKKVNNLLETRNIFSGGSNPEFTHEYWMRHALTLARRARDEGEVPVGAVLVLNNQVIGEGWNRAIGLHDPTAHAEIMALRQGGLALQNYRLIDTTLYSTFEPCVMCSGAMVHSRIGTLVFGVRNSKRGAAGSLMNVLNYPGMNHQVKTIGGVLAPECSGLLCDFYRMPRQVFNQQKAELKSINDGGSDSEQVQKFLSRNLNDTRYASRLVLNTLQSFFENQDTIVRVVNGSFTHTLRKKWGADLDKTRETHHHHAVDATLCAVTPFVKVSRYHYAVNEETGEKFMREIDVETGEILDEIPYREYKKAKHYERKTYQVKWSNFREQLKPITIHPKIKFSHQVDRKANRKLSDATIYSVREKTEVKTLKSGKEKITTDEYTIGKIKDIYTVDGWEAFKKKQDKLLMKEFDEKTYELLVTIAATTPDFQEVEEKNGKVKRVKRSPFAVYCEENGIPAIRKYAKKNNGPVIRSLKYYDGKLNKHINITKDEKGRPVEQTKNGRKVTLQSLKPYRYDIYQDLETKAYYTVQLYYSDLRFVEGEYGITEKEYMKKVAEQTKGQVVRFCFSLQKNDGLEIEWKDSQRYDVRFYNFQSANSINFKGLEQEMIPAENQFKQKPYNNGAINLNIAKYGKEGKKLRKFNTDILGKKHHLSYEKEPKNIIKGSSGGSSGKRPAATKKAGQAKKKK

SEQ ID NO: 621 - protein, 1343 aa, synthetic construct
  REGION 1..1343: note = LPG20087
MAPKKKRKVGSSGGSSGSKVAKNMTRVNLGFAIGIASVGWSVLDNQTGKILETGVSIFPSGSASRNEERRSFRQSRRLIRRKKARICDMDHLLKKNGFPFPGNTGANPYEIRVKGLTEKLSREELAIALHHLVKRRGISYDLKDVEDESAGGTNYQESIAVNQRLLKKETPAEIQLARLTECGKVRGQVKSLGEDNTATTLLNVFPNAAYQEEMVKLLKKQQEFYGEIDDPFMETAIGILSRKREYFIGPGSEKSRTDYGIYRTDGTTLKNLFEILVGKDKIFPDQYRAAGNSYTAQLYNLLNDLNNLEVDATEDGKLTTAHKEQIIEELTTTTGNVNMLKLIAKVAGTSPAGIKKYRVDREGKPEFHSLAIYRRLRKKLGEAGFEINEWPPEFFDDYGPIVTLNTESGELRKWLAEEGSRKYDFLTEPVIEAILANKSAFDSVGKNKWHRFSLKTMQLLIPELLHTFKEQMTILAEMGLLHENKKDYGDQNKVDVKYLTENLYNPVVRKSVKQAMDIFNALFEKYANIDYVVIEMPRDDAEDELEQKKQFQKFQLKNEKEKDASLKEFQELAGVSDLQLEAQLRKRKKLRQKIRMWYQQRGKCPYSGKTIAAVDLFHQDNQFEIDHIIPLSVSFDDGQNNKVLCYSEMNQEKGKQTPYAFMSRGGGQGFSALQAYVKSNNRLENAKKRNLLFTEDINDLEVRKRFIARNLVDTRYASRIVLNELQQFVRSKELDTRVTVIRGKLTSKLRDRWRLNKSRETHHHHAVDAAVIAVSPMLKMWEKNAEIIPLKVDENTVDLKSGEIITDQEYAAQMYELPYARFLEQMPELHKKIKFHHQVDKKMNRKVSDATLYSTRKAKVGTDKKEQEYVIGKIKDIYQFDQYKKFKKLYDGDKSKFLMQRLDPQTFAKLEKIMEDYPAKIDATQPSGGSNPEFTHEYWMRHALTLARRARDEGEVPVGAVLVLNNQVIGEGWNRAIGLHDPTAHAEIMALRQGGLVLQNYRLIDTTLYSTFEPCVMCSGAMVHSRIGTLVFGVRNSKRGAAGSLLNVLNYPGMNHQVKTIGGVLAPECSGLLCDFYRMPRQVFNQQKAELKSINDGGSNGTIKLVDISPFELYRREHGPVTKYAKKNNGPAIKSLKFYDSIVGSSVKITPKNAKGKEVILKSLKPWRTDVYYNHEKEQYEIMGIKYADLKFKGDNYGITKARYQEIKEEEGVSEESEFLFSLYRGDRIQVSNGEDKIDLLFLSRSNPAKKGYVELKPIDRNQLNGKEVVSVYGAASGGRLKKQFVKKNHTLHKVNTDILGNPFYIKKESDQPKNILDLGSSGGSSGKRPAATKKAGQAKKKK

SEQ ID NO: 622 - protein, 1343 aa, synthetic construct
  REGION 1..1343: note = LPG20088
MAPKKKRKVGSSGGSSGSKVAKNMTRVNLGFAIGIASVGWSVLDNQTGKILETGVSIFPSGSASRNEERRSFRQSRRLIRRKKARICDMDHLLKKNGFPFPGNTGANPYEIRVKGLTEKLSREELAIALHHLVKRRGISYDLKDVEDESAGGTNYQESIAVNQRLLKKETPAEIQLARLTECGKVRGQVKSLGEDNTATTLLNVFPNAAYQEEMVKLLKKQQEFYGEIDDPFMETAIGILSRKREYFIGPGSEKSRTDYGIYRTDGTTLKNLFEILVGKDKIFPDQYRAAGNSYTAQLYNLLNDLNNLEVDATEDGKLTTAHKEQIIEELTTTTGNVNMLKLIAKVAGTSPAGIKKYRVDREGKPEFHSLAIYRRLRKKLGEAGFEINEWPPEFFDDYGPIVTLNTESGELRKWLAEEGSRKYDFLTEPVIEAILANKSAFDSVGKNKWHRFSLKTMQLLIPELLHTFKEQMTILAEMGLLHENKKDYGDQNKVDVKYLTENLYNPVVRKSVKQAMDIFNALFEKYANIDYVVIEMPRDDAEDELEQKKQFQKFQLKNEKEKDASLKEFQELAGVSDLQLEAQLRKRKKLRQKIRMWYQQRGKCPYSGKTIAAVDLFHQDNQFEIDHIIPLSVSFDDGQNNKVLCYSEMNQEKGKQTPYAFMSRGGGQGFSALQAYVKSNNRLENAKKRNLLFTEDINDLEVRKRFIARNLVDTRYASRIVLNELQQFVRSKELDTRVTVIRGKLTSKLRDRWRLNKSRETHHHHAVDAAVIAVSPMLKMWEKNAEIIPLKVDENTVDLKSGEIITDQEYAAQMYELPYARFLEQMPELHKKIKFHHQVDKKMNRKVSDATLYSTRKAKVGTDKKEQEYVIGKIKDIYQFDQYKKFKKLYDGDKSKFLMQRLDPQTFAKLEKIMEDYPAKIDATQPSGGSNPEFTHEYWMRHALTLARRARDEGEVPVGAVLVLNNQVIGEGWNRAIGLHDPTAHAEIMALRQGGLVLQNYRLYDTTLYSTFEPCVMCSGAMVHSRIGTLVFGVRNSKRGAAGSLLNVLGYPGMNHQVKTIGGVLAPECSGLLLDFYRMPRQVWNQQKDELKSINDGGSNGTIKLVDISPFELYRREHGPVTKYAKKNNGPAIKSLKFYDSIVGSSVKITPKNAKGKEVILKSLKPWRTDVYYNHEKEQYEIMGIKYADLKFKGDNYGITKARYQEIKEEEGVSEESEFLFSLYRGDRIQVSNGEDKIDLLFLSRSNPAKKGYVELKPIDRNQLNGKEVVSVYGAASGGRLKKQFVKKNHTLHKVNTDILGNPFYIKKESDQPKNILDLGSSGGSSGKRPAATKKAGQAKKKK

SEQ ID NO: 623 - protein, 1363 aa, synthetic construct
  REGION 1..1363: note = LPG20089
MAPKKKRKVGSSGGSSGYSIGLALGISSVGWSVIDEETGKIVDLGVRLFSAKNSEKNLERRTSRGARRLIRRKTNRLKDAKKLLEAIGFYEDKALKNVCPYQLRVKGLTEGLTKGELYKVVLHIVKKRGISYLDEDDAEAAKESQDYKEQVRKNAQLLTKYTPGQIQLQRLKENNRVKTGINGQGHYQLNVFKVSAYADELATILKTQQALYPNELTDDWIALFVQPGIAENAGLIYRKRPYYHGPGNEANNSPYGRWSDFQKTGQPAANIFDKLIGKDFQGELRASGLSLSAQQYNLLNDLTNLKIDGEVSLSPEQKEFILTELMTKEFARFGVNDIAKLLGVKKEQLSGWRLDKKGKPEIHTLKGYRNWRKIFAEAGIDLATLPTETIDCLAKVLTLNTEREGVENTLAFELPELAEPVKSLVLDHYKELSQSISTQAWHRFSLKTLHLLIPELIKSTSEQNTLLEQFQLKAGVRKRYSDYKKLPTKEVLAEIYNPTVNKTVSQAFKVMDALLEKYGKDQIHYITVEMPRDDNEEEERKRIKELQTKNSQRKNDSQQYFLQKSGWSQEKFQATIHKNRRFLAKLLYYFEQDGVCAYTGNPISPELLVSDSTEIDHIIPISISLDDSINNKVLVLSHANQVKGQQTPYDARMAGAFNKINGKFSNWDEYQKWVESRPFSRKKVNNLLETRNIFDSEQVQKFLSRNLNDTRYASRLVLNTLQSFFENQDTIVRVVNGSFTHTLRKKWGADLDKTRETHHHHAVDATLCAVTPFVKVSRYHYAVNEETGEKFMREIDVETGEILDEIPYREYKKAKHYERKTYQVKWSNFREQLKPITIHPKIKFSHQVDRKANRKLSDATIYSVREKTEVKTLKSGKEKITTDEYTIGKIKDIYTVDGWEAFKKKQDKLLMKEFDEKTYELLVTIAATTPDFQEVEEKSGGSNPEFTHEYWMRHALTLARRARDEGEVPVGAVLVLNNQVIGEGWNRAIGLHDPTAHAEIMALRQGGLVLQNYRLIDTTLYSTFEPCVMCSGAMVHSRIGTLVFGVRNSKRGAAGSLLNVLNYPGMNHQVKTIGGVLAPECSGLLCDFYRMPRQVFNQQKAELKSINDGGSNGKVKRVKRSPFAVYCEENGIPAIRKYAKKNNGPVIRSLKYYDGKLNKHINITKDEKGRPVEQTKNGRKVTLQSLKPYRYDIYQDLETKAYYTVQLYYSDLRFVEGEYGITEKEYMKKVAEQTKGQVVRFCFSLQKNDGLEIEWKDSQRYDVRFYNFQSANSINFKGLEQEMIPAENQFKQKPYNNGAINLNIAKYGKEGKKLRKFNTDILGKKHHLSYEKEPKNIIKGSSGGSSGKRPAATKKAGQAKKKK

SEQ ID NO: 624 - protein, 1343 aa, synthetic construct
  REGION 1..1343: note = LPG20090
MAPKKKRKVGSSGGSSGSKVAKNMTRVNLGFAIGIASVGWSVLDNQTGKILETGVSIFPSGSASRNEERRSFRQSRRLIRRKKARICDMDHLLKKNGFPFPGNTGANPYEIRVKGLTEKLSREELAIALHHLVKRRGISYDLKDVEDESAGGTNYQESIAVNQRLLKKETPAEIQLARLTECGKVRGQVKSLGEDNTATTLLNVFPNAAYQEEMVKLLKKQQEFYGEIDDPFMETAIGILSRKREYFIGPGSEKSRTDYGIYRTDGTTLKNLFEILVGKDKIFPDQYRAAGNSYTAQLYNLLNDLNNLEVDATEDGKLTTAHKEQIIEELTTTTGNVNMLKLIAKVAGTSPAGIKKYRVDREGKPEFHSLAIYRRLRKKLGEAGFEINEWPPEFFDDYGPIVTLNTESGELRKWLAEEGSRKYDFLTEPVIEAILANKSAFDSVGKNKWHRFSLKTMQLLIPELLHTFKEQMTILAEMGLLHENKKDYGDQNKVDVKYLTENLYNPVVRKSVKQAMDIFNALFEKYANIDYVVIEMPRDDAEDELEQKKQFQKFQLKNEKEKDASLKEFQELAGVSDLQLEAQLRKRKKLRQKIRMWYQQRGKCPYSGKTIAAVDLFHQDNQFEIDHIIPLSVSFDDGQNNKVLCYSEMNQEKGKQTPYAFMSRGGGQGFSALQAYVKSNNRLENAKKRNLLFTEDINDLEVRKRFIARNLVDTRYASRIVLNELQQFVRSKELDTRVTVIRGKLTSKLRDRWRLNKSRETHHHHAVDAAVIAVSPMLKMWEKNAEIIPLKVDENTVDLKSGEIITDQEYAAQMYELPYARFLEQMPELHKKIKFHHQVDKKMNRKVSDATLYSTRKAKVGTDKKEQEYVIGKIKDIYQFDQYKKFKKLYDGDKSKFLMQRLDPQTFAKLEKIMEDYPAKIDATQPSGGSNPEFTHEYWMRHALTLARRARDEGEVPVGAVLVLNNQVIGEGWNRAIGLHDPTAHAEIMALRQGGLALQNYRLIDTTLYSTFEPCVMCSGAMVHSRIGTLVFGVRNSKRGAAGSLMNVLNYPGMNHQVKTIGGVLAPECSGLLCDFYRMPRQVFNQQKAELKSINDGGSNGTIKLVDISPFELYRREHGPVTKYAKKNNGPAIKSLKFYDSIVGSSVKITPKNAKGKEVILKSLKPWRTDVYYNHEKEQYEIMGIKYADLKFKGDNYGITKARYQEIKEEEGVSEESEFLFSLYRGDRIQVSNGEDKIDLLFLSRSNPAKKGYVELKPIDRNQLNGKEVVSVYGAASGGRLKKQFVKKNHTLHKVNTDILGNPFYIKKESDQPKNILDLGSSGGSSGKRPAATKKAGQAKKKK

SEQ ID NO: 625 - protein, 1389 aa, synthetic construct
  REGION 1..1389: note = LPG20091
MAPKKKRKVGSSGGSSGSNPEFTHEYWMRHALTLARRARDEGEVPVGAVLVLNNQVIGEGWNRAIGLHDPTAHAEIMALRQGGLVLQNYRLIDTTLYSTFEPCVMCSGAMVHSRIGTLVFGVRNSKRGAAGSLLNVLNYPGMNHQVKTIGGVLAPECSGLLCDFYRMPRQVFNQQKAELKSINDSGGSSGGSSGSETPGTSESATPESSGGSSGGSYSIGLALGISSVGWSVIDEETGKIVDLGVRLFSAKNSEKNLERRTSRGARRLIRRKTNRLKDAKKLLEAIGFYEDKALKNVCPYQLRVKGLTEGLTKGELYKVVLHIVKKRGISYLDEDDAEAAKESQDYKEQVRKNAQLLTKYTPGQIQLQRLKENNRVKTGINGQGHYQLNVFKVSAYADELATILKTQQALYPNELTDDWIALFVQPGIAENAGLIYRKRPYYHGPGNEANNSPYGRWSDFQKTGQPAANIFDKLIGKDFQGELRASGLSLSAQQYNLLNDLTNLKIDGEVSLSPEQKEFILTELMTKEFARFGVNDIAKLLGVKKEQLSGWRLDKKGKPEIHTLKGYRNWRKIFAEAGIDLATLPTETIDCLAKVLTLNTEREGVENTLAFELPELAEPVKSLVLDHYKELSQSISTQAWHRFSLKTLHLLIPELIKSTSEQNTLLEQFQLKAGVRKRYSDYKKLPTKEVLAEIYNPTVNKTVSQAFKVMDALLEKYGKDQIHYITVEMPRDDNEEEERKRIKELQTKNSQRKNDSQQYFLQKSGWSQEKFQATIHKNRRFLAKLLYYFEQDGVCAYTGNPISPELLVSDSTEIDHIIPISISLDDSINNKVLVLSHANQVKGQQTPYDARMAGAFNKINGKFSNWDEYQKWVESRPFSRKKVNNLLETRNIFDSEQVQKFLSRNLNDTRYASRLVLNTLQSFFENQDTIVRVVNGSFTHTLRKKWGADLDKTRETHHHHAVDATLCAVTPFVKVSRYHYAVNEETGEKFMREIDVETGEILDEIPYREYKKAKHYERKTYQVKWSNFREQLKPITIHPKIKFSHQVDRKANRKLSDATIYSVREKTEVKTLKSGKEKITTDEYTIGKIKDIYTVDGWEAFKKKQDKLLMKEFDEKTYELLVTIAATTPDFQEVEEKNGKVKRVKRSPFAVYCEENGIPAIRKYAKKNNGPVIRSLKYYDGKLNKHINITKDEKGRPVEQTKNGRKVTLQSLKPYRYDIYQDLETKAYYTVQLYYSDLRFVEGEYGITEKEYMKKVAEQTKGQVVRFCFSLQKNDGLEIEWKDSQRYDVRFYNFQSANSINFKGLEQEMIPAENQFKQKPYNNGAINLNIAKYGKEGKKLRKFNTDILGKKHHLSYEKEPKNIIKGSSGGSSGKRPAATKKAGQAKKKK

SEQ ID NO: 626 - protein, 1363 aa, synthetic construct
  REGION 1..1363: note = LPG20092
MAPKKKRKVGSSGGSSGYSIGLALGISSVGWSVIDEETGKIVDLGVRLFSAKNSEKNLERRTSRGARRLIRRKTNRLKDAKKLLEAIGFYEDKALKNVCPYQLRVKGLTEGLTKGELYKVVLHIVKKRGISYLDEDDAEAAKESQDYKEQVRKNAQLLTKYTPGQIQLQRLKENNRVKTGINGQGHYQLNVFKVSAYADELATILKTQQALYPNELTDDWIALFVQPGIAENAGLIYRKRPYYHGPGNEANNSPYGRWSDFQKTGQPAANIFDKLIGKDFQGELRASGLSLSAQQYNLLNDLTNLKIDGEVSLSPEQKEFILTELMTKEFARFGVNDIAKLLGVKKEQLSGWRLDKKGKPEIHTLKGYRNWRKIFAEAGIDLATLPTETIDCLAKVLTLNTEREGVENTLAFELPELAEPVKSLVLDHYKELSQSISTQAWHRFSLKTLHLLIPELIKSTSEQNTLLEQFQLKAGVRKRYSDYKKLPTKEVLAEIYNPTVNKTVSQAFKVMDALLEKYGKDQIHYITVEMPRDDNEEEERKRIKELQTKNSQRKNDSQQYFLQKSGWSQEKFQATIHKNRRFLAKLLYYFEQDGVCAYTGNPISPELLVSDSTEIDHIIPISISLDDSINNKVLVLSHANQVKGQQTPYDARMAGAFNKINGKFSNWDEYQKWVESRPFSRKKVNNLLETRNIFDSEQVQKFLSRNLNDTRYASRLVLNTLQSFFENQDTIVRVVNGSFTHTLRKKWGADLDKTRETHHHHAVDATLCAVTPFVKVSRYHYAVNEETGEKFMREIDVETGEILDEIPYREYKKAKHYERKTYQVKWSNFREQLKPITIHPKIKFSHQVDRKANRKLSDATIYSVREKTEVKTLKSGKEKITTDEYTIGKIKDIYTVDGWEAFKKKQDKLLMKEFDEKTYELLVTIAATTPDFQEVEEKSGGSNPEFTHEYWMRHALTLARRARDEGEVPVGAVLVLNNQVIGEGWNRAIGLHDPTAHAEIMALRQGGLALQNYRLIDTTLYSTFEPCVMCSGAMVHSRIGTLVFGVRNSKRGAAGSLMNVLNYPGMNHQVKTIGGVLAPECSGLLCDFYRMPRQVFNQQKAELKSINDGGSNGKVKRVKRSPFAVYCEENGIPAIRKYAKKNNGPVIRSLKYYDGKLNKHINITKDEKGRPVEQTKNGRKVTLQSLKPYRYDIYQDLETKAYYTVQLYYSDLRFVEGEYGITEKEYMKKVAEQTKGQVVRFCFSLQKNDGLEIEWKDSQRYDVRFYNFQSANSINFKGLEQEMIPAENQFKQKPYNNGAINLNIAKYGKEGKKLRKFNTDILGKKHHLSYEKEPKNIIKGSSGGSSGKRPAATKKAGQAKKKK

SEQ ID NO: 627 - protein, 1389 aa, synthetic construct
  REGION 1..1389: note = LPG20093
MAPKKKRKVGSSGGSSGSNPEFTHEYWMRHALTLARRARDEGEVPVGAVLVLNNQVIGEGWNRAIGLHDPTAHAEIMALRQGGLALQNYRLIDTTLYSTFEPCVMCSGAMVHSRIGTLVFGVRNSKRGAAGSLMNVLNYPGMNHQVKTIGGVLAPECSGLLCDFYRMPRQVFNQQKAELKSINDSGGSSGGSSGSETPGTSESATPESSGGSSGGSYSIGLALGISSVGWSVIDEETGKIVDLGVRLFSAKNSEKNLERRTSRGARRLIRRKTNRLKDAKKLLEAIGFYEDKALKNVCPYQLRVKGLTEGLTKGELYKVVLHIVKKRGISYLDEDDAEAAKESQDYKEQVRKNAQLLTKYTPGQIQLQRLKENNRVKTGINGQGHYQLNVFKVSAYADELATILKTQQALYPNELTDDWIALFVQPGIAENAGLIYRKRPYYHGPGNEANNSPYGRWSDFQKTGQPAANIFDKLIGKDFQGELRASGLSLSAQQYNLLNDLTNLKIDGEVSLSPEQKEFILTELMTKEFARFGVNDIAKLLGVKKEQLSGWRLDKKGKPEIHTLKGYRNWRKIFAEAGIDLATLPTETIDCLAKVLTLNTEREGVENTLAFELPELAEPVKSLVLDHYKELSQSISTQAWHRFSLKTLHLLIPELIKSTSEQNTLLEQFQLKAGVRKRYSDYKKLPTKEVLAEIYNPTVNKTVSQAFKVMDALLEKYGKDQIHYITVEMPRDDNEEEERKRIKELQTKNSQRKNDSQQYFLQKSGWSQEKFQATIHKNRRFLAKLLYYFEQDGVCAYTGNPISPELLVSDSTEIDHIIPISISLDDSINNKVLVLSHANQVKGQQTPYDARMAGAFNKINGKFSNWDEYQKWVESRPFSRKKVNNLLETRNIFDSEQVQKFLSRNLNDTRYASRLVLNTLQSFFENQDTIVRVVNGSFTHTLRKKWGADLDKTRETHHHHAVDATLCAVTPFVKVSRYHYAVNEETGEKFMREIDVETGEILDEIPYREYKKAKHYERKTYQVKWSNFREQLKPITIHPKIKFSHQVDRKANRKLSDATIYSVREKTEVKTLKSGKEKITTDEYTIGKIKDIYTVDGWEAFKKKQDKLLMKEFDEKTYELLVTIAATTPDFQEVEEKNGKVKRVKRSPFAVYCEENGIPAIRKYAKKNNGPVIRSLKYYDGKLNKHINITKDEKGRPVEQTKNGRKVTLQSLKPYRYDIYQDLETKAYYTVQLYYSDLRFVEGEYGITEKEYMKKVAEQTKGQVVRFCFSLQKNDGLEIEWKDSQRYDVRFYNFQSANSINFKGLEQEMIPAENQFKQKPYNNGAINLNIAKYGKEGKKLRKFNTDILGKKHHLSYEKEPKNIIKGSSGGSSGKRPAATKKAGQAKKKK

SEQ ID NO: 628 - protein, 1369 aa, synthetic construct
  REGION 1..1369: note = LPG20094
MAPKKKRKVGSSGGSSGSNPEFTHEYWMRHALTLARRARDEGEVPVGAVLVLNNQVIGEGWNRAIGLHDPTAHAEIMALRQGGLVLQNYRLIDTTLYSTFEPCVMCSGAMVHSRIGTLVFGVRNSKRGAAGSLLNVLNYPGMNHQVKTIGGVLAPECSGLLCDFYRMPRQVFNQQKAELKSINDSGGSSGGSSGSETPGTSESATPESSGGSSGGSSKVAKNMTRVNLGFAIGIASVGWSVLDNQTGKILETGVSIFPSGSASRNEERRSFRQSRRLIRRKKARICDMDHLLKKNGFPFPGNTGANPYEIRVKGLTEKLSREELAIALHHLVKRRGISYDLKDVEDESAGGTNYQESIAVNQRLLKKETPAEIQLARLTECGKVRGQVKSLGEDNTATTLLNVFPNAAYQEEMVKLLKKQQEFYGEIDDPFMETAIGILSRKREYFIGPGSEKSRTDYGIYRTDGTTLKNLFEILVGKDKIFPDQYRAAGNSYTAQLYNLLNDLNNLEVDATEDGKLTTAHKEQIIEELTTTTGNVNMLKLIAKVAGTSPAGIKKYRVDREGKPEFHSLAIYRRLRKKLGEAGFEINEWPPEFFDDYGPIVTLNTESGELRKWLAEEGSRKYDFLTEPVIEAILANKSAFDSVGKNKWHRFSLKTMQLLIPELLHTFKEQMTILAEMGLLHENKKDYGDQNKVDVKYLTENLYNPVVRKSVKQAMDIFNALFEKYANIDYVVIEMPRDDAEDELEQKKQFQKFQLKNEKEKDASLKEFQELAGVSDLQLEAQLRKRKKLRQKIRMWYQQRGKCPYSGKTIAAVDLFHQDNQFEIDHIIPLSVSFDDGQNNKVLCYSEMNQEKGKQTPYAFMSRGGGQGFSALQAYVKSNNRLENAKKRNLLFTEDINDLEVRKRFIARNLVDTRYASRIVLNELQQFVRSKELDTRVTVIRGKLTSKLRDRWRLNKSRETHHHHAVDAAVIAVSPMLKMWEKNAEIIPLKVDENTVDLKSGEIITDQEYAAQMYELPYARFLEQMPELHKKIKFHHQVDKKMNRKVSDATLYSTRKAKVGTDKKEQEYVIGKIKDIYQFDQYKKFKKLYDGDKSKFLMQRLDPQTFAKLEKIMEDYPAKIDATQPNGTIKLVDISPFELYRREHGPVTKYAKKNNGPAIKSLKFYDSIVGSSVKITPKNAKGKEVILKSLKPWRTDVYYNHEKEQYEIMGIKYADLKFKGDNYGITKARYQEIKEEEGVSEESEFLFSLYRGDRIQVSNGEDKIDLLFLSRSNPAKKGYVELKPIDRNQLNGKEVVSVYGAASGGRLKKQFVKKNHTLHKVNTDILGNPFYIKKESDQPKNILDLGSSGGSSGKRPAATKKAGQAKKKK

SEQ ID NO: 629 - protein, 1369 aa, synthetic construct
  REGION 1..1369: note = LPG20095
MAPKKKRKVGSSGGSSGSNPEFTHEYWMRHALTLARRARDEGEVPVGAVLVLNNQVIGEGWNRAIGLHDPTAHAEIMALRQGGLVLQNYRLYDTTLYSTFEPCVMCSGAMVHSRIGTLVFGVRNSKRGAAGSLLNVLGYPGMNHQVKTIGGVLAPECSGLLLDFYRMPRQVWNQQKDELKSINDSGGSSGGSSGSETPGTSESATPESSGGSSGGSSKVAKNMTRVNLGFAIGIASVGWSVLDNQTGKILETGVSIFPSGSASRNEERRSFRQSRRLIRRKKARICDMDHLLKKNGFPFPGNTGANPYEIRVKGLTEKLSREELAIALHHLVKRRGISYDLKDVEDESAGGTNYQESIAVNQRLLKKETPAEIQLARLTECGKVRGQVKSLGEDNTATTLLNVFPNAAYQEEMVKLLKKQQEFYGEIDDPFMETAIGILSRKREYFIGPGSEKSRTDYGIYRTDGTTLKNLFEILVGKDKIFPDQYRAAGNSYTAQLYNLLNDLNNLEVDATEDGKLTTAHKEQIIEELTTTTGNVNMLKLIAKVAGTSPAGIKKYRVDREGKPEFHSLAIYRRLRKKLGEAGFEINEWPPEFFDDYGPIVTLNTESGELRKWLAEEGSRKYDFLTEPVIEAILANKSAFDSVGKNKWHRFSLKTMQLLIPELLHTFKEQMTILAEMGLLHENKKDYGDQNKVDVKYLTENLYNPVVRKSVKQAMDIFNALFEKYANIDYVVIEMPRDDAEDELEQKKQFQKFQLKNEKEKDASLKEFQELAGVSDLQLEAQLRKRKKLRQKIRMWYQQRGKCPYSGKTIAAVDLFHQDNQFEIDHIIPLSVSFDDGQNNKVLCYSEMNQEKGKQTPYAFMSRGGGQGFSALQAYVKSNNRLENAKKRNLLFTEDINDLEVRKRFIARNLVDTRYASRIVLNELQQFVRSKELDTRVTVIRGKLTSKLRDRWRLNKSRETHHHHAVDAAVIAVSPMLKMWEKNAEIIPLKVDENTVDLKSGEIITDQEYAAQMYELPYARFLEQMPELHKKIKFHHQVDKKMNRKVSDATLYSTRKAKVGTDKKEQEYVIGKIKDIYQFDQYKKFKKLYDGDKSKFLMQRLDPQTFAKLEKIMEDYPAKIDATQPNGTIKLVDISPFELYRREHGPVTKYAKKNNGPAIKSLKFYDSIVGSSVKITPKNAKGKEVILKSLKPWRTDVYYNHEKEQYEIMGIKYADLKFKGDNYGITKARYQEIKEEEGVSEESEFLFSLYRGDRIQVSNGEDKIDLLFLSRSNPAKKGYVELKPIDRNQLNGKEVVSVYGAASGGRLKKQFVKKNHTLHKVNTDILGNPFYIKKESDQPKNILDLGSSGGSSGKRPAATKKAGQAKKKK

SEQ ID NO: 630 - protein, 1284 aa, synthetic construct
  REGION 1..1284: note = LPG20096
MAPKKKRKVGSSGGSSGRELDYRIGLAIGTNSIGWGVIELSWNKDRERYEKVRIVDQGVRMFDRAEMPKTGASLAEPRRIARSSRRRLNRKSQRKKNIRNLLVQHGVITQEELDSLYPLSKKSMDIWGIRLDGLDRLLNHFEWARLLIHLAQRRGFKSNRKSELKDTETGKVLSSIQLNEKRLSLYRTVGEMWMKDPDFSKYDRKRNSPNEYVFSVSRAELEKEIVTLFAAQRRFQSPYASKDLQETYLQIWTHQLPFASGNAILNKVGYCSLLKGKERRIPKATYTFQYFSALDQVNRTRLGPDFQPFTKEQREIILNNMFQRTDYYKKKTIPEVTYYDIRKWLELDETIQFKGLNYDPNEELKKIEKKPFINLKAFYEINKVVANYSERTNETFSTLDYDGIGYALTVYKTDKDIRSYLKSSHNLPKRCYDDQLIEELLSLSYTKFGHLSLKAINHVLSIMQKGNTYKEAVDQLGYDTSGLKKEKRSKFLPPISDEITNPIVKRALTQARKVVNAIIRRHGSPHSVHIELARELSKNHDERTKIVSAQDENYKKNKGAISILSEHGILNPTGYDIVRYKLWKEQGERCAYSLKEIPADTFFNELKKERNGAPILEVDHILPYSQSFIDSYHNKVLVYSDENRKKGNRIPYTYFLETNKDWEAFERYVRSNKFFSKKKREYLLKRAYLPRESELIKERHLNDTRYASTFLKNFIEQNLQFKEAEDNPRKRRVQTVNGVITAHFRKRWGLEKDRQETYLHHAMDAIIVACTDHHMVTRVTEYYQIKESGGSSNPEFTHEYWMRHALTLARRARDEGEVPVGAVLVLNNQVIGEGWNRAIGLHDPTAHAEIMALRQGGLVLQNYRLIDTTLYSTFEPCVMCSGAMVHSRIGTLVFGVRNSKRGAAGSLLNVLNYPGMNHQVKTIGGVLAPECSGLLCDFYRMPRQVFNQQKAELKSINDSGGNKSVKKPYFPMPWEGFRDELLSHLASQPIAKKISEELKAGYQSLDYIFVSRMPKRSITGAAHKQTIMRKGGIDKKGKTIIIERLHLKDIKFDENGDFKMVGKEQDMATYEAIKQRYLEHGKNSKKAFETPLYKPSKKGTGNLIKRVKVEGQAKSFVREVNGGVAQNGDLVRVDLFEKDDKYYMVPIYVPDTVCSELPKKVVASSKGYEQWLTLDNSFTFKFSLYPYDLVRLVKGDEDRFLYFGTLDIDSDRLNFKDVNKPSKKNEYRYSLKTIEDLEKYEVGVLGDLRLVRKETRRNFHGSSGGSSGKRPAATKKAGQAKKKK

SEQ ID NO: 631 - protein, 1284 aa, synthetic construct
  REGION 1..1284: note = LPG20097
MAPKKKRKVGSSGGSSGRELDYRIGLAIGTNSIGWGVIELSWNKDRERYEKVRIVDQGVRMFDRAEMPKTGASLAEPRRIARSSRRRLNRKSQRKKNIRNLLVQHGVITQEELDSLYPLSKKSMDIWGIRLDGLDRLLNHFEWARLLIHLAQRRGFKSNRKSELKDTETGKVLSSIQLNEKRLSLYRTVGEMWMKDPDFSKYDRKRNSPNEYVFSVSRAELEKEIVTLFAAQRRFQSPYASKDLQETYLQIWTHQLPFASGNAILNKVGYCSLLKGKERRIPKATYTFQYFSALDQVNRTRLGPDFQPFTKEQREIILNNMFQRTDYYKKKTIPEVTYYDIRKWLELDETIQFKGLNYDPNEELKKIEKKPFINLKAFYEINKVVANYSERTNETFSTLDYDGIGYALTVYKTDKDIRSYLKSSHNLPKRCYDDQLIEELLSLSYTKFGHLSLKAINHVLSIMQKGNTYKEAVDQLGYDTSGLKKEKRSKFLPPISDEITNPIVKRALTQARKVVNAIIRRHGSPHSVHIELARELSKNHDERTKIVSAQDENYKKNKGAISILSEHGILNPTGYDIVRYKLWKEQGERCAYSLKEIPADTFFNELKKERNGAPILEVDHILPYSQSFIDSYHNKVLVYSDENRKKGNRIPYTYFLETNKDWEAFERYVRSNKFFSKKKREYLLKRAYLPRESELIKERHLNDTRYASTFLKNFIEQNLQFKEAEDNPRKRRVQTVNGVITAHFRKRWGLEKDRQETYLHHAMDAIIVACTDHHMVTRVTEYYQIKESGGSSNPEFTHEYWMRHALTLARRARDEGEVPVGAVLVLNNQVIGEGWNRAIGLHDPTAHAEIMALRQGGLALQNYRLIDTTLYSTFEPCVMCSGAMVHSRIGTLVFGVRNSKRGAAGSLMNVLNYPGMNHQVKTIGGVLAPECSGLLCDFYRMPRQVFNQQKAELKSINDSGGNKSVKKPYFPMPWEGFRDELLSHLASQPIAKKISEELKAGYQSLDYIFVSRMPKRSITGAAHKQTIMRKGGIDKKGKTIIIERLHLKDIKFDENGDFKMVGKEQDMATYEAIKQRYLEHGKNSKKAFETPLYKPSKKGTGNLIKRVKVEGQAKSFVREVNGGVAQNGDLVRVDLFEKDDKYYMVPIYVPDTVCSELPKKVVASSKGYEQWLTLDNSFTFKFSLYPYDLVRLVKGDEDRFLYFGTLDIDSDRLNFKDVNKPSKKNEYRYSLKTIEDLEKYEVGVLGDLRLVRKETRRNFHGSSGGSSGKRPAATKKAGQAKKKK

SEQ ID NO: 632 - protein, 1284 aa, synthetic construct
  REGION 1..1284: note = LPG20098
MAPKKKRKVGSSGGSSGRELDYRIGLAIGTNSIGWGVIELSWNKDRERYEKVRIVDQGVRMFDRAEMPKTGASLAEPRRIARSSRRRLNRKSQRKKNIRNLLVQHGVITQEELDSLYPLSKKSMDIWGIRLDGLDRLLNHFEWARLLIHLAQRRGFKSNRKSELKDTETGKVLSSIQLNEKRLSLYRTVGEMWMKDPDFSKYDRKRNSPNEYVFSVSRAELEKEIVTLFAAQRRFQSPYASKDLQETYLQIWTHQLPFASGNAILNKVGYCSLLKGKERRIPKATYTFQYFSALDQVNRTRLGPDFQPFTKEQREIILNNMFQRTDYYKKKTIPEVTYYDIRKWLELDETIQFKGLNYDPNEELKKIEKKPFINLKAFYEINKVVANYSERTNETFSTLDYDGIGYALTVYKTDKDIRSYLKSSHNLPKRCYDDQLIEELLSLSYTKFGHLSLKAINHVLSIMQKGNTYKEAVDQLGYDTSGLKKEKRSKFLPPISDEITNPIVKRALTQARKVVNAIIRRHGSPHSVHIELARELSKNHDERTKIVSAQDENYKKNKGAISILSEHGILNPTGYDIVRYKLWKEQGERCAYSLKEIPADTFFNELKKERNGAPILEVDHILPYSQSFIDSYHNKVLVYSDENRKKGNRIPYTYFLETNKDWEAFERYVRSNKFFSKKKREYLLKRAYLPRESELIKERHLNDTRYASTFLKNFIEQNLQFKEAEDNPRKRRVQTVNGVITAHFRKRWGLEKDRQETYLHHAMDAIIVACTDHHMVTRVTEYYQIKESGGSSNPEFTHEYWMRHALTLARRARDEGEVPVGAVLVLNNQVIGEGWNRAIGLHDPTAHAEIMALRQGGLVLQNYRLYDTTLYSTFEPCVMCSGAMVHSRIGTLVFGVRNSKRGAAGSLLNVLGYPGMNHQVKTIGGVLAPECSGLLLDFYRMPRQVWNQQKDELKSINDSGGNKSVKKPYFPMPWEGFRDELLSHLASQPIAKKISEELKAGYQSLDYIFVSRMPKRSITGAAHKQTIMRKGGIDKKGKTIIIERLHLKDIKFDENGDFKMVGKEQDMATYEAIKQRYLEHGKNSKKAFETPLYKPSKKGTGNLIKRVKVEGQAKSFVREVNGGVAQNGDLVRVDLFEKDDKYYMVPIYVPDTVCSELPKKVVASSKGYEQWLTLDNSFTFKFSLYPYDLVRLVKGDEDRFLYFGTLDIDSDRLNFKDVNKPSKKNEYRYSLKTIEDLEKYEVGVLGDLRLVRKETRRNFHGSSGGSSGKRPAATKKAGQAKKKK

SEQ ID NO: 633 - protein, 167 aa, synthetic construct; identical to SEQ ID NO: 598
  REGION 1..167: note = LPG50318

SEQ ID NO: 634 - protein, 1244 aa, synthetic construct
  REGION 1..1244: note = deadAPG07433.1_inlaidS772_LPG50148 (LPG20134)
MRELDYRIGLAIGTNSIGWGVIELSWNKDRERYEKVRIVDQGVRMFDRAEMPKTGASLAEPRRIARSSRRRLNRKSQRKKNIRNLLVQHGVITQEELDSLYPLSKKSMDIWGIRLDGLDRLLNHFEWARLLIHLAQRRGFKSNRKSELKDTETGKVLSSIQLNEKRLSLYRTVGEMWMKDPDFSKYDRKRNSPNEYVFSVSRAELEKEIVTLFAAQRRFQSPYASKDLQETYLQIWTHQLPFASGNAILNKVGYCSLLKGKERRIPKATYTFQYFSALDQVNRTRLGPDFQPFTKEQREIILNNMFQRTDYYKKKTIPEVTYYDIRKWLELDETIQFKGLNYDPNEELKKIEKKPFINLKAFYEINKVVANYSERTNETFSTLDYDGIGYALTVYKTDKDIRSYLKSSHNLPKRCYDDQLIEELLSLSYTKFGHLSLKAINHVLSIMQKGNTYKEAVDQLGYDTSGLKKEKRSKFLPPISDEITNPIVKRALTQARKVVNAIIRRHGSPHSVHIELARELSKNHDERTKIVSAQDENYKKNKGAISILSEHGILNPTGYDIVRYKLWKEQGERCAYSLKEIPADTFFNELKKERNGAPILEVDAILPYSQSFIDSYHNKVLVYSDENRKKGNRIPYTYFLETNKDWEAFERYVRSNKFFSKKKREYLLKRAYLPRESELIKERHLNDTRYASTFLKNFIEQNLQFKEAEDNPRKRRVQTVNGVITAHFRKRWGLEKDRQETYLHHAMDAIIVACTDHHMVTRVTEYYQIKESGGSSNPEFTHEYWMRHALTLARRARDEGEVPVGAVLVLNNQVIGEGWNRAIGLHDPTAHAEIMALRQGGLVLQNYRLIDTTLYVTFEPCVMCSGAMVHSRIGTLVFGVRNSKRGAAGSLMNVLNYPGMNHQVKTIGGVLAPECSGLLCDFYRMPRQVFNQQKAELKSINDSGGNKSVKKPYFPMPWEGFRDELLSHLASQPIAKKISEELKAGYQSLDYIFVSRMPKRSITGAAHKQTIMRKGGIDKKGKTIIIERLHLKDIKFDENGDFKMVGKEQDMATYEAIKQRYLEHGKNSKKAFETPLYKPSKKGTGNLIKRVKVEGQAKSFVREVNGGVAQNGDLVRVDLFEKDDKYYMVPIYVPDTVCSELPKKVVASSKGYEQWLTLDNSFTFKFSLYPYDLVRLVKGDEDRFLYFGTLDIDSDRLNFKDVNKPSKKNEYRYSLKTIEDLEKYEVGVLGDLRLVRKETRRNFH

SEQ ID NO: 635 - protein, 1244 aa, synthetic construct
  REGION 1..1244: note = deadAPG07433.1_inlaidS775_LPG50148 (LPG20135)
MRELDYRIGLAIGTNSIGWGVIELSWNKDRERYEKVRIVDQGVRMFDRAEMPKTGASLAEPRRIARSSRRRLNRKSQRKKNIRNLLVQHGVITQEELDSLYPLSKKSMDIWGIRLDGLDRLLNHFEWARLLIHLAQRRGFKSNRKSELKDTETGKVLSSIQLNEKRLSLYRTVGEMWMKDPDFSKYDRKRNSPNEYVFSVSRAELEKEIVTLFAAQRRFQSPYASKDLQETYLQIWTHQLPFASGNAILNKVGYCSLLKGKERRIPKATYTFQYFSALDQVNRTRLGPDFQPFTKEQREIILNNMFQRTDYYKKKTIPEVTYYDIRKWLELDETIQFKGLNYDPNEELKKIEKKPFINLKAFYEINKVVANYSERTNETFSTLDYDGIGYALTVYKTDKDIRSYLKSSHNLPKRCYDDQLIEELLSLSYTKFGHLSLKAINHVLSIMQKGNTYKEAVDQLGYDTSGLKKEKRSKFLPPISDEITNPIVKRALTQARKVVNAIIRRHGSPHSVHIELARELSKNHDERTKIVSAQDENYKKNKGAISILSEHGILNPTGYDIVRYKLWKEQGERCAYSLKEIPADTFFNELKKERNGAPILEVDAILPYSQSFIDSYHNKVLVYSDENRKKGNRIPYTYFLETNKDWEAFERYVRSNKFFSKKKREYLLKRAYLPRESELIKERHLNDTRYASTFLKNFIEQNLQFKEAEDNPRKRRVQTVNGVITAHFRKRWGLEKDRQETYLHHAMDAIIVACTDHHMVTRVTEYYQIKESNKSGGSSNPEFTHEYWMRHALTLARRARDEGEVPVGAVLVLNNQVIGEGWNRAIGLHDPTAHAEIMALRQGGLVLQNYRLIDTTLYVTFEPCVMCSGAMVHSRIGTLVFGVRNSKRGAAGSLMNVLNYPGMNHQVKTIGGVLAPECSGLLCDFYRMPRQVFNQQKAELKSINDSGGVKKPYFPMPWEGFRDELLSHLASQPIAKKISEELKAGYQSLDYIFVSRMPKRSITGAAHKQTIMRKGGIDKKGKTIIIERLHLKDIKFDENGDFKMVGKEQDMATYEAIKQRYLEHGKNSKKAFETPLYKPSKKGTGNLIKRVKVEGQAKSFVREVNGGVAQNGDLVRVDLFEKDDKYYMVPIYVPDTVCSELPKKVVASSKGYEQWLTLDNSFTFKFSLYPYDLVRLVKGDEDRFLYFGTLDIDSDRLNFKDVNKPSKKNEYRYSLKTIEDLEKYEVGVLGDLRLVRKETRRNFH

SEQ ID NO: 636 - protein, 1310 aa, synthetic construct; identical to SEQ ID NO: 604
  REGION 1..1310: note = deadAPG07433.1_inlaidK778_LPG50148 (LPG20136)

SEQ ID NO: 637 - protein, 1244 aa, synthetic construct
  REGION 1..1244: note = deadAPG07433.1_inlaidE900_LPG50148 (LPG20137)
MRELDYRIGLAIGTNSIGWGVIELSWNKDRERYEKVRIVDQGVRMFDRAEMPKTGASLAEPRRIARSSRRRLNRKSQRKKNIRNLLVQHGVITQEELDSLYPLSKKSMDIWGIRLDGLDRLLNHFEWARLLIHLAQRRGFKSNRKSELKDTETGKVLSSIQLNEKRLSLYRTVGEMWMKDPDFSKYDRKRNSPNEYVFSVSRAELEKEIVTLFAAQRRFQSPYASKDLQETYLQIWTHQLPFASGNAILNKVGYCSLLKGKERRIPKATYTFQYFSALDQVNRTRLGPDFQPFTKEQREIILNNMFQRTDYYKKKTIPEVTYYDIRKWLELDETIQFKGLNYDPNEELKKIEKKPFINLKAFYEINKVVANYSERTNETFSTLDYDGIGYALTVYKTDKDIRSYLKSSHNLPKRCYDDQLIEELLSLSYTKFGHLSLKAINHVLSIMQKGNTYKEAVDQLGYDTSGLKKEKRSKFLPPISDEITNPIVKRALTQARKVVNAIIRRHGSPHSVHIELARELSKNHDERTKIVSAQDENYKKNKGAISILSEHGILNPTGYDIVRYKLWKEQGERCAYSLKEIPADTFFNELKKERNGAPILEVDAILPYSQSFIDSYHNKVLVYSDENRKKGNRIPYTYFLETNKDWEAFERYVRSNKFFSKKKREYLLKRAYLPRESELIKERHLNDTRYASTFLKNFIEQNLQFKEAEDNPRKRRVQTVNGVITAHFRKRWGLEKDRQETYLHHAMDAIIVACTDHHMVTRVTEYYQIKESNKSVKKPYFPMPWEGFRDELLSHLASQPIAKKISEELKAGYQSLDYIFVSRMPKRSITGAAHKQTIMRKGGIDKKGKTIIIERLHLKDIKFDENGDFKMVGKEQDMATYEAIKQRYLEHGKNSKKAFEGGSSNPEFTHEYWMRHALTLARRARDEGEVPVGAVLVLNNQVIGEGWNRAIGLHDPTAHAEIMALRQGGLVLQNYRLIDTTLYVTFEPCVMCSGAMVHSRIGTLVFGVRNSKRGAAGSLMNVLNYPGMNHQVKTIGGVLAPECSGLLCDFYRMPRQVFNQQKAELKSINDSGGTPLYKPSKKGTGNLIKRVKVEGQAKSFVREVNGGVAQNGDLVRVDLFEKDDKYYMVPIYVPDTVCSELPKKVVASSKGYEQWLTLDNSFTFKFSLYPYDLVRLVKGDEDRFLYFGTLDIDSDRLNFKDVNKPSKKNEYRYSLKTIEDLEKYEVGVLGDLRLVRKETRRNFH

SEQ ID NO: 638 - protein, 1244 aa, synthetic construct
  REGION 1..1244: note = deadAPG07433.1_inlaidG910_LPG50148 (LPG20138)
MRELDYRIGLAIGTNSIGWGVIELSWNKDRERYEKVRIVDQGVRMFDRAEMPKTGASLAEPRRIARSSRRRLNRKSQRKKNIRNLLVQHGVITQEELDSLYPLSKKSMDIWGIRLDGLDRLLNHFEWARLLIHLAQRRGFKSNRKSELKDTETGKVLSSIQLNEKRLSLYRTVGEMWMKDPDFSKYDRKRNSPNEYVFSVSRAELEKEIVTLFAAQRRFQSPYASKDLQETYLQIWTHQLPFASGNAILNKVGYCSLLKGKERRIPKATYTFQYFSALDQVNRTRLGPDFQPFTKEQREIILNNMFQRTDYYKKKTIPEVTYYDIRKWLELDETIQFKGLNYDPNEELKKIEKKPFINLKAFYEINKVVANYSERTNETFSTLDYDGIGYALTVYKTDKDIRSYLKSSHNLPKRCYDDQLIEELLSLSYTKFGHLSLKAINHVLSIMQKGNTYKEAVDQLGYDTSGLKKEKRSKFLPPISDEITNPIVKRALTQARKVVNAIIRRHGSPHSVHIELARELSKNHDERTKIVSAQDENYKKNKGAISILSEHGILNPTGYDIVRYKLWKEQGERCAYSLKEIPADTFFNELKKERNGAPILEVDAILPYSQSFIDSYHNKVLVYSDENRKKGNRIPYTYFLETNKDWEAFERYVRSNKFFSKKKREYLLKRAYLPRESELIKERHLNDTRYASTFLKNFIEQNLQFKEAEDNPRKRRVQTVNGVITAHFRKRWGLEKDRQETYLHHAMDAIIVACTDHHMVTRVTEYYQIKESNKSVKKPYFPMPWEGFRDELLSHLASQPIAKKISEELKAGYQSLDYIFVSRMPKRSITGAAHKQTIMRKGGIDKKGKTIIIERLHLKDIKFDENGDFKMVGKEQDMATYEAIKQRYLEHGKNSKKAFETPLYKPSKKGGGSSNPEFTHEYWMRHALTLARRARDEGEVPVGAVLVLNNQVIGEGWNRAIGLHDPTAHAEIMALRQGGLVLQNYRLIDTTLYVTFEPCVMCSGAMVHSRIGTLVFGVRNSKRGAAGSLMNVLNYPGMNHQVKTIGGVLAPECSGLLCDFYRMPRQVFNQQKAELKSINDSGGTGNLIKRVKVEGQAKSFVREVNGGVAQNGDLVRVDLFEKDDKYYMVPIYVPDTVCSELPKKVVASSKGYEQWLTLDNSFTFKFSLYPYDLVRLVKGDEDRFLYFGTLDIDSDRLNFKDVNKPSKKNEYRYSLKTIEDLEKYEVGVLGDLRLVRKETRRNFH

SEQ ID NO: 639 - protein, 1363 aa, synthetic construct; identical to SEQ ID NO: 615
  REGION 1..1363: note = LPG20130

SEQ ID NO: 640 - RNA, 135 nt, synthetic construct
  source 1..135: mol_type = other RNA
  misc_feature 1..135: note = SGN002336
ccagatgcccgccatgccctccagcgtcatagttccattaaagccaaaagtggctttgatgtttctatgataagggtttcgacccgtggcgtcggggatcgcctgcccattgaaatgggcttctccccatttatt

SEQ ID NO: 641 - RNA, 135 nt, synthetic construct
  source 1..135: mol_type = other RNA
  misc_feature 1..135: note = SGN002364
ttccatatgtaatgaacagaggatcgtcatagttccattaaagccaaaagtggctttgatgtttctatgataagggtttcgacccgtggcgtcggggatcgcctgcccattgaaatgggcttctccccatttatt

SEQ ID NO: 642 - protein, 4 aa, synthetic construct
  REGION 1..4: note = peptide linker
GSSG

SEQ ID NO: 643 - protein, 1390 aa, synthetic construct
  REGION 1..1390: note = LPG20099
MAPKKKRKVGSSGGSSGSNPEFTHEYWMRHALTLARRARDEGEVPVGAVLVNNNQVIGEGWNRAIGLHDPTAHAEIMALRQGGLVLQNYRLIDTTLYSTFEPCVMCSGAMVHSRIGTLVFGVRNSKRGAAGSLMNVLNYPGMNHQVKTIGGVLAPECSGLLCDFYRMPRQVFRQQKAEWKSINDSGGSSGGSSGSETPGTSESATPESSGGSSGGSQIDAHQSCDMQNDKPYVIGFALGDFSVGMSAIQIDSEGLPTRILNSQSVIHDSGIDPSQRKYGTSRKKEAGIARRIRRMRRYRKHRLNKLSQILSTNGYKRMNIRQFHGPDIWLIRASAADQYIADEDARRTAIRVSCEHIARHRGWRNPYQNPRVLLHAQPDSATYEQLRENAADHMGGVMPADNETPAQIVRDVLDYHRGEPAIRLRHTGKVTRKTKKNQHTPCAWVLPERMMQSDNAYELRRILETQQVPEPLIEQLILAVFYQISPKGSAEHLAGKDAIDPTRVRAPKCSLAFQRYRIADVISNLRVGIEQRRLTVEEKQAIARLLASDNKQTCEYETWAAVAETLGHPATWLKGIGEPAPDGEGNVTNRPPHIDILHRISQLDDNTLRVTLLNWWDSHTTEDKESFIRVLSNTVNIETVADDPAYKAALQLLDGLDDTQLNKLDAMNLESGRAAYSENTLNKLADWMLTHEGDVTDAREQVFHIARDWRPPQEPVGAPLGNPPVDRSLKIAARWLDAIEQRYGKPISVQVEHTRKAFTSVETRMKNQKEWQDSSRCKARQALREQLAKQGGSISENSLMRREAITRQNGECLYCGASIDITTCQMDHIVPRKGSGCTNTKDNLVAVCPTCNQEKSNMPFPAYCATESARMRGVSMKDAIHRVHHLNLDDQGYKSKAQKALKDGIIRRLKQTEADDPIDGRSLESTSWMAVELYKRLTWRYAHNGGTPVTVNVYRGELTAEARSIMRHAAGMDFHMIGGHGKTRLDRRHHAIDASVIAMMTPAAAQAIAARISMHEAETLTGMRTDWRTYPANPTAKYQHWLESMRRLMNLLNTALDDDRIRVLRNQRYRLGSSAAHKDTITPLTYRELGDPLDASLIRHASTPALYTALTHLPDYNDADGLPANPERRINVNGTIIDSDDTIAFFTGDAAQILVNDGGAAVGSSIHHARVYRYYTLLKSGKRKYAYGWIRVYQQDLIHAHGDLFTEPLTACTLSLRYADQTLVSAIRDGRAEYLGHLLAGDEIVVDFTDGKGAVGKFNEFFAKDIREQPSAMRRWTVTGFPTLVQTSLRPCYLSGEGLAKLEERGGEPVPKEVEKILAGSGGYTPSVNTVFSLHPAIIHRNVFGEERWGTVSGLPTSWRVNDTQKGSSGGSSGKRPAATKKAGQAKKKK

SEQ ID NO: 644 - protein, 1390 aa, synthetic construct
  REGION 1..1390: note = LPG20100
MAPKKKRKVGSSGGSSGSNPEFTHEYWMRHALTLARRARDEGEVPVGAVLVLNNQVIGEGWNRAIGLHDPTAHAEIMALRQGGLVLQNYRLWDTTLYSTFEPCVMCSGAMVHSRIGTLVFGVRNSKRGAAGSLMNVLNYPGMNHQVKTIGGVLAPECSGLLCDFYRMPRQVWNQQKDELKSINDSGGSSGGSSGSETPGTSESATPESSGGSSGGSQIDAHQSCDMQNDKPYVIGFALGDFSVGMSAIQIDSEGLPTRILNSQSVIHDSGIDPSQRKYGTSRKKEAGIARRIRRMRRYRKHRLNKLSQILSTNGYKRMNIRQFHGPDIWLIRASAADQYIADEDARRTAIRVSCEHIARHRGWRNPYQNPRVLLHAQPDSATYEQLRENAADHMGGVMPADNETPAQIVRDVLDYHRGEPAIRLRHTGKVTRKTKKNQHTPCAWVLPERMMQSDNAYELRRILETQQVPEPLIEQLILAVFYQISPKGSAEHLAGKDAIDPTRVRAPKCSLAFQRYRIADVISNLRVGIEQRRLTVEEKQAIARLLASDNKQTCEYETWAAVAETLGHPATWLKGIGEPAPDGEGNVTNRPPHIDILHRISQLDDNTLRVTLLNWWDSHTTEDKESFIRVLSNTVNIETVADDPAYKAALQLLDGLDDTQLNKLDAMNLESGRAAYSENTLNKLADWMLTHEGDVTDAREQVFHIARDWRPPQEPVGAPLGNPPVDRSLKIAARWLDAIEQRYGKPISVQVEHTRKAFTSVETRMKNQKEWQDSSRCKARQALREQLAKQGGSISENSLMRREAITRQNGECLYCGASIDITTCQMDHIVPRKGSGCTNTKDNLVAVCPTCNQEKSNMPFPAYCATESARMRGVSMKDAIHRVHHLNLDDQGYKSKAQKALKDGIIRRLKQTEADDPIDGRSLESTSWMAVELYKRLTWRYAHNGGTPVTVNVYRGELTAEARSIMRHAAGMDFHMIGGHGKTRLDRRHHAIDASVIAMMTPAAAQAIAARISMHEAETLTGMRTDWRTYPANPTAKYQHWLESMRRLMNLLNTALDDDRIRVLRNQRYRLGSSAAHKDTITPLTYRELGDPLDASLIRHASTPALYTALTHLPDYNDADGLPANPERRINVNGTIIDSDDTIAFFTGDAAQILVNDGGAAVGSSIHHARVYRYYTLLKSGKRKYAYGWIRVYQQDLIHAHGDLFTEPLTACTLSLRYADQTLVSAIRDGRAEYLGHLLAGDEIVVDFTDGKGAVGKFNEFFAKDIREQPSAMRRWTVTGFPTLVQTSLRPCYLSGEGLAKLEERGGEPVPKEVEKILAGSGGYTPSVNTVFSLHPAIIHRNVFGEERWGTVSGLPTSWRVNDTQKGSSGGSSGKRPAATKKAGQAKKKK

SEQ ID NO: 645 - protein, 1390 aa, synthetic construct
  REGION 1..1390: note = LPG20101
MAPKKKRKVGSSGGSSGSNPEFTHEYWMRHALTLARRARDEGEVPVGAVLVLNNQVIGEGWNRAIGLHDPTAHAEIMALRQGGLVLQNYRLYDTTLYSTFEPCVMCSGAMVHSRIGTLVFGVRNSKRGAAGSLLNVLGYPGMNHQVKTIGGVLAPECSGLLLDFYRMPRQVWNQQKDELKSINDSGGSSGGSSGSETPGTSESATPESSGGSSGGSQIDAHQSCDMQNDKPYVIGFALGDFSVGMSAIQIDSEGLPTRILNSQSVIHDSGIDPSQRKYGTSRKKEAGIARRIRRMRRYRKHRLNKLSQILSTNGYKRMNIRQFHGPDIWLIRASAADQYIADEDARRTAIRVSCEHIARHRGWRNPYQNPRVLLHAQPDSATYEQLRENAADHMGGVMPADNETPAQIVRDVLDYHRGEPAIRLRHTGKVTRKTKKNQHTPCAWVLPERMMQSDNAYELRRILETQQVPEPLIEQLILAVFYQISPKGSAEHLAGKDAIDPTRVRAPKCSLAFQRYRIADVISNLRVGIEQRRLTVEEKQAIARLLASDNKQTCEYETWAAVAETLGHPATWLKGIGEPAPDGEGNVTNRPPHIDILHRISQLDDNTLRVTLLNWWDSHTTEDKESFIRVLSNTVNIETVADDPAYKAALQLLDGLDDTQLNKLDAMNLESGRAAYSENTLNKLADWMLTHEGDVTDAREQVFHIARDWRPPQEPVGAPLGNPPVDRSLKIAARWLDAIEQRYGKPISVQVEHTRKAFTSVETRMKNQKEWQDSSRCKARQALREQLAKQGGSISENSLMRREAITRQNGECLYCGASIDITTCQMDHIVPRKGSGCTNTKDNLVAVCPTCNQEKSNMPFPAYCATESARMRGVSMKDAIHRVHHLNLDDQGYKSKAQKALKDGIIRRLKQTEADDPIDGRSLESTSWMAVELYKRLTWRYAHNGGTPVTVNVYRGELTAEARSIMRHAAGMDFHMIGGHGKTRLDRRHHAIDASVIAMMTPAAAQAIAARISMHEAETLTGMRTDWRTYPANPTAKYQHWLESMRRLMNLLNTALDDDRIRVLRNQRYRLGSSAAHKDTITPLTYRELGDPLDASLIRHASTPALYTALTHLPDYNDADGLPANPERRINVNGTIIDSDDTIAFFTGDAAQILVNDGGAAVGSSIHHARVYRYYTLLKSGKRKYAYGWIRVYQQDLIHAHGDLFTEPLTACTLSLRYADQTLVSAIRDGRAEYLGHLLAGDEIVVDFTDGKGAVGKFNEFFAKDIREQPSAMRRWTVTGFPTLVQTSLRPCYLSGEGLAKLEERGGEPVPKEVEKILAGSGGYTPSVNTVFSLHPAIIHRNVFGEERWGTVSGLPTSWRVNDTQKGSSGGSSGKRPAATKKAGQAKKKK

SEQ ID NO: 646 - protein, 1390 aa, synthetic construct
  REGION 1..1390: note = LPG20102
MAPKKKRKVGSSGGSSGSNPEFTHEYWMRHALTLARRARDEGEVPVGAVLVLNNQVIGEGWNRAIGLHDPTAHAEIMALRQGGLVLQNYRLIDTTLYSTFEPCVMCSGAMVHSRIGTLVFGVRNSKRGAAGSLLNVLNYPGMNHQVKTIGGVLAPECSGLLCDFYRMPRQVFNQQKAELKSINDSGGSSGGSSGSETPGTSESATPESSGGSSGGSQIDAHQSCDMQNDKPYVIGFALGDFSVGMSAIQIDSEGLPTRILNSQSVIHDSGIDPSQRKYGTSRKKEAGIARRIRRMRRYRKHRLNKLSQILSTNGYKRMNIRQFHGPDIWLIRASAADQYIADEDARRTAIRVSCEHIARHRGWRNPYQNPRVLLHAQPDSATYEQLRENAADHMGGVMPADNETPAQIVRDVLDYHRGEPAIRLRHTGKVTRKTKKNQHTPCAWVLPERMMQSDNAYELRRILETQQVPEPLIEQLILAVFYQISPKGSAEHLAGKDAIDPTRVRAPKCSLAFQRYRIADVISNLRVGIEQRRLTVEEKQAIARLLASDNKQTCEYETWAAVAETLGHPATWLKGIGEPAPDGEGNVTNRPPHIDILHRISQLDDNTLRVTLLNWWDSHTTEDKESFIRVLSNTVNIETVADDPAYKAALQLLDGLDDTQLNKLDAMNLESGRAAYSENTLNKLADWMLTHEGDVTDAREQVFHIARDWRPPQEPVGAPLGNPPVDRSLKIAARWLDAIEQRYGKPISVQVEHTRKAFTSVETRMKNQKEWQDSSRCKARQALREQLAKQGGSISENSLMRREAITRQNGECLYCGASIDITTCQMDHIVPRKGSGCTNTKDNLVAVCPTCNQEKSNMPFPAYCATESARMRGVSMKDAIHRVHHLNLDDQGYKSKAQKALKDGIIRRLKQTEADDPIDGRSLESTSWMAVELYKRLTWRYAHNGGTPVTVNVYRGELTAEARSIMRHAAGMDFHMIGGHGKTRLDRRHHAIDASVIAMMTPAAAQAIAARISMHEAETLTGMRTDWRTYPANPTAKYQHWLESMRRLMNLLNTALDDDRIRVLRNQRYRLGSSAAHKDTITPLTYRELGDPLDASLIRHASTPALYTALTHLPDYNDADGLPANPERRINVNGTIIDSDDTIAFFTGDAAQILVNDGGAAVGSSIHHARVYRYYTLLKSGKRKYAYGWIRVYQQDLIHAHGDLFTEPLTACTLSLRYADQTLVSAIRDGRAEYLGHLLAGDEIVVDFTDGKGAVGKFNEFFAKDIREQPSAMRRWTVTGFPTLVQTSLRPCYLSGEGLAKLEERGGEPVPKEVEKILAGSGGYTPSVNTVFSLHPAIIHRNVFGEERWGTVSGLPTSWRVNDTQKGSSGGSSGKRPAATKKAGQAKKKK

SEQ ID NO: 647 - protein, 1364 aa, synthetic construct
  REGION 1..1364: note = LPG20111
MAPKKKRKVGSSGGSSGQIDAHQSCDMQNDKPYVIGFALGDFSVGMSAIQIDSEGLPTRILNSQSVIHDSGIDPSQRKYGTSRKKEAGIARRIRRMRRYRKHRLNKLSQILSTNGYKRMNIRQFHGPDIWLIRASAADQYIADEDARRTAIRVSCEHIARHRGWRNPYQNPRVLLHAQPDSATYEQLRENAADHMGGVMPADNETPAQIVRDVLDYHRGEPAIRLRHTGKVTRKTKKNQHTPCAWVLPERMMQSDNAYELRRILETQQVPEPLIEQLILAVFYQISPKGSAEHLAGKDAIDPTRVRAPKCSLAFQRYRIADVISNLRVGIEQRRLTVEEKQAIARLLASDNKQTCEYETWAAVAETLGHPATWLKGIGEPAPDGEGNVTNRPPHIDILHRISQLDDNTLRVTLLNWWDSHTTEDKESFIRVLSNTVNIETVADDPAYKAALQLLDGLDDTQLNKLDAMNLESGRAAYSENTLNKLADWMLTHEGDVTDAREQVFHIARDWRPPQEPVGAPLGNPPVDRSLKIAARWLDAIEQRYGKPISVQVEHTRKAFTSVETRMKNQKEWQDSSRCKARQALREQLAKQGGSISENSLMRREAITRQNGECLYCGASIDITTCQMDHIVPRKGSGCTNTKDNLVAVCPTCNQEKSNMPFPAYCATESARMRGVSMKDAIHRVHHLNLDDQGYKSKAQKALKDGIIRRLKQTEADDPIDGRSLESTSWMAVELYKRLTWRYAHNGGTPVTVNVYRGELTAEARSIMRHAAGMDFHMIGGHGKTRLDRRHHAIDASVIAMMTPAAAQAIAARISMHEAETLTGGSSNPEFTHEYWMRHALTLARRARDEGEVPVGAVLVLNNQVIGEGWNRAIGLHDPTAHAEIMALRQGGLVLQNYRLWDTTLYSTFEPCVMCSGAMVHSRIGTLVFGVRNSKRGAAGSLMNVLNYPGMNHQVKTIGGVLAPECSGLLCDFYRMPRQVWNQQKDELKSINDSGGGMRTDWRTYPANPTAKYQHWLESMRRLMNLLNTALDDDRIRVLRNQRYRLGSSAAHKDTITPLTYRELGDPLDASLIRHASTPALYTALTHLPDYNDADGLPANPERRINVNGTIIDSDDTIAFFTGDAAQILVNDGGAAVGSSIHHARVYRYYTLLKSGKRKYAYGWIRVYQQDLIHAHGDLFTEPLTACTLSLRYADQTLVSAIRDGRAEYLGHLLAGDEIVVDFTDGKGAVGKFNEFFAKDIREQPSAMRRWTVTGFPTLVQTSLRPCYLSGEGLAKLEERGGEPVPKEVEKILAGSGGYTPSVNTVFSLHPAIIHRNVFGEERWGTVSGLPTSWRVNDTQKGSSGGSSGKRPAATKKAGQAKKKK

SEQ ID NO: 648 - protein, 1364 aa, synthetic construct
  REGION 1..1364: note = LPG20120
MAPKKKRKVGSSGGSSGQIDAHQSCDMQNDKPYVIGFALGDFSVGMSAIQIDSEGLPTRILNSQSVIHDSGIDPSQRKYGTSRKKEAGIARRIRRMRRYRKHRLNKLSQILSTNGYKRMNIRQFHGPDIWLIRASAADQYIADEDARRTAIRVSCEHIARHRGWRNPYQNPRVLLHAQPDSATYEQLRENAADHMGGVMPADNETPAQIVRDVLDYHRGEPAIRLRHTGKVTRKTKKNQHTPCAWVLPERMMQSDNAYELRRILETQQVPEPLIEQLILAVFYQISPKGSAEHLAGKDAIDPTRVRAPKCSLAFQRYRIADVISNLRVGIEQRRLTVEEKQAIARLLASDNKQTCEYETWAAVAETLGHPATWLKGIGEPAPDGEGNVTNRPPHIDILHRISQLDDNTLRVTLLNWWDSHTTEDKESFIRVLSNTVNIETVADDPAYKAALQLLDGLDDTQLNKLDAMNLESGRAAYSENTLNKLADWMLTHEGDVTDAREQVFHIARDWRPPQEPVGAPLGNPPVDRSLKIAARWLDAIEQRYGKPISVQVEHTRKAFTSVETRMKNQKEWQDSSRCKARQALREQLAKQGGSISENSLMRREAITRQNGECLYCGASIDITTCQMDHIVPRKGSGCTNTKDNLVAVCPTCNQEKSNMPFPAYCATESARMRGVSMKDAIHRVHHLNLDDQGYKSKAQKALKDGIIRRLKQTEADGGSSNPEFTHEYWMRHALTLARRARDEGEVPVGAVLVLNNQVIGEGWNRAIGLHDPTAHAEIMALRQGGLVLQNYRLWDTTLYSTFEPCVMCSGAMVHSRIGTLVFGVRNSKRGAAGSLMNVLNYPGMNHQVKTIGGVLAPECSGLLCDFYRMPRQVWNQQKDELKSINDSGGDPIDGRSLESTSWMAVELYKRLTWRYAHNGGTPVTVNVYRGELTAEARSIMRHAAGMDFHMIGGHGKTRLDRRHHAIDASVIAMMTPAAAQAIAARISMHEAETLTGMRTDWRTYPANPTAKYQHWLESMRRLMNLLNTALDDDRIRVLRNQRYRLGSSAAHKDTITPLTYRELGDPLDASLIRHASTPALYTALTHLPDYNDADGLPANPERRINVNGTIIDSDDTIAFFTGDAAQILVNDGGAAVGSSIHHARVYRYYTLLKSGKRKYAYGWIRVYQQDLIHAHGDLFTEPLTACTLSLRYADQTLVSAIRDGRAEYLGHLLAGDEIVVDFTDGKGAVGKFNEFFAKDIREQPSAMRRWTVTGFPTLVQTSLRPCYLSGEGLAKLEERGGEPVPKEVEKILAGSGGYTPSVNTVFSLHPAIIHRNVFGEERWGTVSGLPTSWRVNDTQKGSSGGSSGKRPAATKKAGQAKKKK

SEQ ID NO: 649 - protein, 1364 aa, synthetic construct
  REGION 1..1364: note = LPG20121
MAPKKKRKVGSSGGSSGQIDAHQSCDMQNDKPYVIGFALGDFSVGMSAIQIDSEGLPTRILNSQSVIHDSGIDPSQRKYGTSRKKEAGIARRIRRMRRYRKHRLNKLSQILSTNGYKRMNIRQFHGPDIWLIRASAADQYIADEDARRTAIRVSCEHIARHRGWRNPYQNPRVLLHAQPDSATYEQLRENAADHMGGVMPADNETPAQIVRDVLDYHRGEPAIRLRHTGKVTRKTKKNQHTPCAWVLPERMMQSDNAYELRRILETQQVPEPLIEQLILAVFYQISPKGSAEHLAGKDAIDPTRVRAPKCSLAFQRYRIADVISNLRVGIEQRRLTVEEKQAIARLLASDNKQTCEYETWAAVAETLGHPATWLKGIGEPAPDGEGNVTNRPPHIDILHRISQLDDNTLRVTLLNWWDSHTTEDKESFIRVLSNTVNIETVADDPAYKAALQLLDGLDDTQLNKLDAMNLESGRAAYSENTLNKLADWMLTHEGDVTDAREQVFHIARDWRPPQEPVGAPLGNPPVDRSLKIAARWLDAIEQRYGKPISVQVEHTRKAFTSVETRMKNQKEWQDSSRCKARQALREQLAKQGGSISENSLMRREAITRQNGECLYCGASIDITTCQMDHIVPRKGSGCTNTKDNLVAVCPTCNQEKSNMPFPAYCATESARMRGVSMKDAIHRVHHLNLDDQGYKSKAQKALKDGIIRRLKQTEADDPIDGRSLESTSWMAVELYKRLTWRYAHNGGTPVTVNVYRGELTAEARSIMRHAAGMDFHMIGGHGKTRLDRRHHAIDASVIAMMTPAAAQAIAARIGGSSNPEFTHEYWMRHALTLARRARDEGEVPVGAVLVLNNQVIGEGWNRAIGLHDPTAHAEIMALRQGGLVLQNYRLWDTTLYSTFEPCVMCSGAMVHSRIGTLVFGVRNSKRGAAGSLMNVLNYPGMNHQVKTIGGVLAPECSGLLCDFYRMPRQVWNQQKDELKSINDSGGSMHEAETLTGMRTDWRTYPANPTAKYQHWLESMRRLMNLLNTALDDDRIRVLRNQRYRLGSSAAHKDTITPLTYRELGDPLDASLIRHASTPALYTALTHLPDYNDADGLPANPERRINVNGTIIDSDDTIAFFTGDAAQILVNDGGAAVGSSIHHARVYRYYTLLKSGKRKYAYGWIRVYQQDLIHAHGDLFTEPLTACTLSLRYADQTLVSAIRDGRAEYLGHLLAGDEIVVDFTDGKGAVGKFNEFFAKDIREQPSAMRRWTVTGFPTLVQTSLRPCYLSGEGLAKLEERGGEPVPKEVEKILAGSGGYTPSVNTVFSLHPAIIHRNVFGEERWGTVSGLPTSWRVNDTQKGSSGGSSGKRPAATKKAGQAKKKK

SEQ ID NO: 650 - protein, 1364 aa, synthetic construct
  REGION 1..1364: note = LPG20122
MAPKKKRKVGSSGGSSGQIDAHQSCDMQNDKPYVIGFALGDFSVGMSAIQIDSEGLPTRILNSQSVIHDSGIDPSQRKYGTSRKKEAGIARRIRRMRRYRKHRLNKLSQILSTNGYKRMNIRQFHGPDIWLIRASAADQYIADEDARRTAIRVSCEHIARHRGWRNPYQNPRVLLHAQPDSATYEQLRENAADHMGGVMPADNETPAQIVRDVLDYHRGEPAIRLRHTGKVTRKTKKNQHTPCAWVLPERMMQSDNAYELRRILETQQVPEPLIEQLILAVFYQISPKGSAEHLAGKDAIDPTRVRAPKCSLAFQRYRIADVISNLRVGIEQRRLTVEEKQAIARLLASDNKQTCEYETWAAVAETLGHPATWLKGIGEPAPDGEGNVTNRPPHIDILHRISQLDDNTLRVTLLNWWDSHTTEDKESFIRVLSNTVNIETVADDPAYKAALQLLDGLDDTQLNKLDAMNLESGRAAYSENTLNKLADWMLTHEGDVTDAREQVFHIARDWRPPQEPVGAPLGNPPVDRSLKIAARWLDAIEQRYGKPISVQVEHTRKAFTSVETRMKNQKEWQDSSRCKARQALREQLAKQGGSISENSLMRREAITRQNGECLYCGASIDITTCQMDHIVPRKGSGCTNTKDNLVAVCPTCNQEKSNMPFPAYCATESARMRGVSMKDAIHRVHHLNLDDQGYKSKAQKALKDGIIRRLKQTEADDPIDGRSLESTSWMAVELYKRLTWRYAHNGGTPVTVNVYRGELTAEARSIMRHAAGMDFHMIGGHGGGSSNPEFTHEYWMRHALTLARRARDEGEVPVGAVLVLNNQVIGEGWNRAIGLHDPTAHAEIMALRQGGLVLQNYRLWDTTLYSTFEPCVMCSGAMVHSRIGTLVFGVRNSKRGAAGSLMNVLNYPGMNHQVKTIGGVLAPECSGLLCDFYRMPRQVWNQQKDELKSINDSGGKTRLDRRHHAIDASVIAMMTPAAAQAIAARISMHEAETLTGMRTDWRTYPANPTAKYQHWLESMRRLMNLLNTALDDDRIRVLRNQRYRLGSSAAHKDTITPLTYRELGDPLDASLIRHASTPALYTALTHLPDYNDADGLPANPERRINVNGTIIDSDDTIAFFTGDAAQILVNDGGAAVGSSIHHARVYRYYTLLKSGKRKYAYGWIRVYQQDLIHAHGDLFTEPLTACTLSLRYADQTLVSAIRDGRAEYLGHLLAGDEIVVDFTDGKGAVGKFNEFFAKDIREQPSAMRRWTVTGFPTLVQTSLRPCYLSGEGLAKLEERGGEPVPKEVEKILAGSGGYTPSVNTVFSLHPAIIHRNVFGEERWGTVSGLPTSWRVNDTQKGSSGGSSGKRPAATKKAGQAKKKK

SEQ ID NO: 651 - RNA, 135 nt, synthetic construct
  source 1..135: mol_type = other RNA
  misc_feature 1..135: note = SGN001432
tgtctctcttttcttacctcgcacagtcatagttccattaaagccaaaagtggctttgatgtttctatgataagggtttcgacccgtggcgtcggggatcgcctgcccattgaaatgggcttctccccatttatt

SEQ ID NO: 652 - RNA, 135 nt, synthetic construct
  source 1..135: mol_type = other RNA
  misc_feature 1..135: note = SGN001433
tcttttcttacctcgcacagtggccgtcatagttccattaaagccaaaagtggctttgatgtttctatgataagggtttcgacccgtggcgtcggggatcgcctgcccattgaaatgggcttctccccatttatt

SEQ ID NO: 653 - RNA, 135 nt, synthetic construct
  source 1..135: mol_type = other RNA
  misc_feature 1..135: note = SGN001434
ttttcttacctcgcacagtggccaggtcatagttccattaaagccaaaagtggctttgatgtttctatgataagggtttcgacccgtggcgtcggggatcgcctgcccattgaaatgggcttctccccatttatt

SEQ ID NO: 654 - RNA, 135 nt, synthetic construct
  source 1..135: mol_type = other RNA
  misc_feature 1..135: note = SGN001435
cttacctcgcacagtggccagctccgtcatagttccattaaagccaaaagtggctttgatgtttctatgataagggtttcgacccgtggcgtcggggatcgcctgcccattgaaatgggcttctccccatttatt

SEQ ID NO: 655 - RNA, 119 nt, synthetic construct
  source 1..119: mol_type = other RNA
  misc_feature 1..119: note = SGN008382
tgtctctcttttcttacctcgcacagtcatagttccattaaaaagttgatgtttctatgataagggtttcgacccgtggcgtcggggatcgcctgcccttgaaagggcttctccccatt

SEQ ID NO: 656 - RNA, 119 nt, synthetic construct
  source 1..119: mol_type = other RNA
  misc_feature 1..119: note = SGN008383
tcttttcttacctcgcacagtggccgtcatagttccattaaaaagttgatgtttctatgataagggtttcgacccgtggcgtcggggatcgcctgcccttgaaagggcttctccccatt

SEQ ID NO: 657 - RNA, 119 nt, synthetic construct
  source 1..119: mol_type = other RNA
  misc_feature 1..119: note = SGN008384
ttttcttacctcgcacagtggccaggtcatagttccattaaaaagttgatgtttctatgataagggtttcgacccgtggcgtcggggatcgcctgcccttgaaagggcttctccccatt

SEQ ID NO: 658 - RNA, 119 nt, synthetic construct
  source 1..119: mol_type = other RNA
  misc_feature 1..119: note = SGN008385
cttacctcgcacagtggccagctccgtcatagttccattaaaaagttgatgtttctatgataagggtttcgacccgtggcgtcggggatcgcctgcccttgaaagggcttctccccatt

SEQ ID NO: 659 - RNA, 119 nt, synthetic construct
  source 1..119: mol_type = other RNA
  misc_feature 1..119: note = SGN008393
gacatgctgttcataatcactgatggtcatagttccattaaaaagttgatgtttctatgataagggtttcgacccgtggcgtcggggatcgcctgcccttgaaagggcttctccccatt

SEQ ID NO: 660 - RNA, 25 nt, Homo sapiens
  source 1..25: mol_type = other RNA
  misc_feature 1..25: note = SGN001432 target seq
tgtctctcttttcttacctcgcaca

SEQ ID NO: 661 - RNA, 25 nt, Homo sapiens
  source 1..25: mol_type = other RNA
  misc_feature 1..25: note = SGN001433 target seq
tcttttcttacctcgcacagtggcc

SEQ ID NO: 662 - RNA, 25 nt, Homo sapiens
  source 1..25: mol_type = other RNA
  misc_feature 1..25: note = SGN001434 target seq
ttttcttacctcgcacagtggccag

SEQ ID NO: 663 - RNA, 25 nt, Homo sapiens
  source 1..25: mol_type = other RNA
  misc_feature 1..25: note = SGN001435 target seq
cttacctcgcacagtggccagctcc

SEQ ID NO: 664 - RNA, 25 nt, Homo sapiens
  source 1..25: mol_type = other RNA
  misc_feature 1..25: note = SGN008382 target seq
tgtctctcttttcttacctcgcaca

SEQ ID NO: 665 - RNA, 25 nt, Homo sapiens
  source 1..25: mol_type = other RNA
  misc_feature 1..25: note = SGN008383 target seq
tcttttcttacctcgcacagtggcc

SEQ ID NO: 666 - RNA, 25 nt, Homo sapiens
  source 1..25: mol_type = other RNA
  misc_feature 1..25: note = SGN008384 target seq
ttttcttacctcgcacagtggccag

SEQ ID NO: 667 - RNA, 25 nt, Homo sapiens
  source 1..25: mol_type = other RNA
  misc_feature 1..25: note = SGN008385 target seq
cttacctcgcacagtggccagctcc

SEQ ID NO: 668 - RNA, 25 nt, Homo sapiens
  source 1..25: mol_type = other RNA
  misc_feature 1..25: note = SGN008393 target seq
gacatgctgttcataatcactgatg

SEQ ID NO: 669 - RNA, 135 nt, synthetic construct
  source 1..135: mol_type = other RNA
  misc_feature 1..135: note = SGN001256
ggagagactcacgctggatagcctcgtcatagttccattaaagccaaaagtggctttgatgtttctatgataagggtttcgacccgtggcgtcggggatcgcctgcccattgaaatgggcttctccccatttatt

SEQ ID NO: 670 - RNA, 135 nt, synthetic construct
  source 1..135: mol_type = other RNA
  misc_feature 1..135: note = SGN001947
ggctatccagcgtgagtctctcctagtcatagttccattaaagccaaaagtggctttgatgtttctatgataagggtttcgacccgtggcgtcggggatcgcctgcccattgaaatgggcttctccccatttatt

SEQ ID NO: 671 - RNA, 135 nt, synthetic construct
  source 1..135: mol_type = other RNA
  misc_feature 1..135: note = SGN001960
agtgtagtacaagagatagaaagacgtcatagttccattaaagccaaaagtggctttgatgtttctatgataagggtttcgacccgtggcgtcggggatcgcctgcccattgaaatgggcttctccccatttatt

SEQ ID NO: 672 - RNA, 135 nt, synthetic construct
  source 1..135: mol_type = other RNA
  misc_feature 1..135: note = SGN003707
aagagagagtagcgcgagcacagctgtcatagttccattaaagccaaaagtggctttgatgtttctatgataagggtttcgacccgtggcgtcggggatcgcctgcccattgaaatgggcttctccccatttatt

SEQ ID NO: 673 - RNA, 135 nt, synthetic construct
  source 1..135: mol_type = other RNA
  misc_feature 1..135: note = SGN004995
tttaggttcgtatctgtaaaaccaagtcatagttccattaaagccaaaagtggctttgatgtttctatgataagggtttcgacccgtggcgtcggggatcgcctgcccattgaaatgggcttctccccatttatt

SEQ ID NO: 674 - RNA, 25 nt, Homo sapiens
  source 1..25: mol_type = other RNA
  misc_feature 1..25: note = SGN001256 target sequence
ggagagactcacgctggatagcctc

SEQ ID NO: 675 - RNA, 25 nt, Homo sapiens
  source 1..25: mol_type = other RNA
  misc_feature 1..25: note = SGN001947 target sequence
ggctatccagcgtgagtctctccta

SEQ ID NO: 676 - RNA, 25 nt, Homo sapiens
  source 1..25: mol_type = other RNA
  misc_feature 1..25: note = SGN001960 target sequence
agtgtagtacaagagatagaaagac

SEQ ID NO: 677 - RNA, 25 nt, Homo sapiens
  source 1..25: mol_type = other RNA
  misc_feature 1..25: note = SGN008385 target seq
  misc_feature 1..25: note = SGN003707 target sequence
aagagagagtagcgcgagcacagct

SEQ ID NO: 678 - RNA, 25 nt, Homo sapiens
  source 1..25: mol_type = other RNA
  misc_feature 1..25: note = SGN004995 target sequence
tttaggttcgtatctgtaaaaccaa

SEQ ID NO: 679 - RNA, 118 nt, synthetic construct
  source 1..118: mol_type = other RNA
  misc_feature 1..118: note = SGN003018
agagtagcgcgagcacagctgttattgtactctcaaggaatcagaaagactgattccttgagaatctacaataataaggctttatgccgaaattcccactcttaacggagtgggtttt

SEQ ID NO: 680 - RNA, 115 nt, synthetic construct
  source 1..115: mol_type = other RNA
  misc_feature 1..115: note = SGN003540
cgggagggtaggagagactcacgctgttattgtactctcaataaaaagttattgagaatctacaataataaggcatcttgccgaatttaccgccctacatatgtagggcggtttt

SEQ ID NO: 681 - RNA, 20 nt, Homo sapiens
  source 1..20: mol_type = other RNA
  misc_feature 1..20: note = SGN003018 target sequence
agagtagcgcgagcacagct

SEQ ID NO: 682 - RNA, 25 nt, Homo sapiens
  source 1..25: mol_type = other RNA
  misc_feature 1..25: note = SGN003540 target sequence
cgggagggtaggagagactcacgct

SEQ ID NO: 683 - RNA, 115 nt, synthetic construct
  source 1..115: mol_type = other RNA
  misc_feature 1..115: note = SGN003486
gtcactggatttagagtctctcagcgttattgtactctcaataaaaagttattgagaatctacaataataaggcatcttgccgaatttaccgccctacatatgtagggcggtttt

SEQ ID NO: 684 - RNA, 135 nt, synthetic construct
  source 1..135: mol_type = other RNA
  misc_feature 1..135: note = SGN002352
atgttctacaaggaggtgaaggacagtcatagttccattaaagccaaaagtggctttgatgtttctatgataagggtttcgacccgtggcgtcggggatcgcctgcccattgaaatgggcttctccccatttatt

SEQ ID NO: 685 - RNA, 135 nt, synthetic construct
  source 1..135: mol_type = other RNA
  misc_feature 1..135: note = SGN001881
tgatcctcttgtcccacagatatccgtcatagttccattaaagccaaaagtggctttgatgtttctatgataagggtttcgacccgtggcgtcggggatcgcctgcccattgaaatgggcttctccccatttatt

SEQ ID NO: 686 - RNA, 25 nt, Homo sapiens
  source 1..25: mol_type = other RNA
  misc_feature 1..25: note = SGN003486 target sequence
gtcactggatttagagtctctcagc

SEQ ID NO: 687 - RNA, 135 nt, synthetic construct
  source 1..135: mol_type = other RNA
  misc_feature 1..135: note = SGN005430
tggggtttacctacctacatagagagtcatagttccattaaagccaaaagtggctttgatgtttctatgataagggtttcgacccgtggcgtcggggatcgcctgcccattgaaatgggcttctccccatttatt

SEQ ID NO: 688 - RNA, 135 nt, synthetic construct
  source 1..135: mol_type = other RNA
  misc_feature 1..135: note = SGN005420
tcttgtcccacagatatccagaaccgtcatagttccattaaagccaaaagtggctttgatgtttctatgataagggtttcgacccgtggcgtcggggatcgcctgcccattgaaatgggcttctccccatttatt

SEQ ID NO: 689 - RNA, 144 nt, synthetic construct
  source 1..144: mol_type = other RNA
  misc_feature 1..144: note = SGN005326
agtccatagacctcatgtctagcacgttggaaatctatccaaagggatagattcccaataaggcgcagcgggatttagctgcactggttgctcacgacatcaacatgtcgtaggggaggctccttcacggggcctccccgtttt

SEQ ID NO: 690 - RNA, 144 nt, synthetic construct
  source 1..144: mol_type = other RNA
  misc_feature 1..144: note = SGN005329
ttcgggccgagatgtctcgctccgtgttggaaatctatccaaagggatagattcccaataaggcgcagcgggatttagctgcactggttgctcacgacatcaacatgtcgtaggggaggctccttcacggggcctccccgtttt

SEQ ID NO: 691 - RNA, 25 nt, Homo sapiens
  source 1..25: mol_type = other RNA
  misc_feature 1..25: note = SGN005326 target sequence
agtccatagacctcatgtctagcac

SEQ ID NO: 692 - RNA, 25 nt, Homo sapiens
  source 1..25: mol_type = other RNA
  misc_feature 1..25: note = SGN005329 target sequence
ttcgggccgagatgtctcgctccgt

SEQ ID NO: 693 - RNA, 110 nt, synthetic construct
  source 1..110: mol_type = other RNA
  misc_feature 1..110: note = Full-length APG07433.1 backbone (F)
gtcatagttccattaaagccaaaagtggctttgatgtttctatgataagggtttcgacccgtggcgtcggggatcgcctgcccattgaaatgggcttctccccatttatt

SEQ ID NO: 694 - RNA, 94 nt, synthetic construct
  source 1..94: mol_type = other RNA
  misc_feature 1..94: note = Shortened APG07433.1 backbone (M)
gtcatagttccattaaaaagttgatgtttctatgataagggtttcgacccgtggcgtcggggatcgcctgcccttgaaagggcttctccccatt

SEQ ID NO: 695 - RNA, 90 nt, synthetic construct
  source 1..90: mol_type = other RNA
  misc_feature 1..90: note = APG05586 Backbone
gttattgtactctcaataaaaagttattgagaatctacaataataaggcatcttgccgaatttaccgccctacatatgtagggcggtttt

SEQ ID NO: 696 - RNA, 98 nt, synthetic construct
  source 1..98: mol_type = other RNA
  misc_feature 1..98: note = Shortened LPG10145 backbone
gttattgtactctcaaggaatcagaaagactgattccttgagaatctacaataataaggctttatgccgaaattcccactcttaacggagtgggtttt

SEQ ID NO: 697 - RNA, 119 nt, synthetic construct
  source 1..119: mol_type = other RNA
  misc_feature 1..119: note = Shortened LPG10196 backbone
gttggaaatctatccaaagggatagattcccaataaggcgcagcgggatttagctgcactggttgctcacgacatcaacatgtcgtaggggaggctccttcacggggcctccccgtttt

SEQ ID NO: 698 - protein, 1151 aa, synthetic construct
MQIDAHQSCDMQNDKPYVIGFALGDFSVGMSAIQIDSEGLPTRILNSQSVIHDSGIDPSQRKYGTSRKKEAGIARRIRRMRRYRKHRLNKLSQILSTNGYKRMNIRQFHGPDIWLIRASAADQYIADEDARRTAIRVSCEHIARHRGWRNPYQNPRVLLHAQPDSATYEQLRENAADHMGGVMPADNETPAQIVRDVLDYHRGEPAIRLRHTGKVTRKTKKNQHTPCAWVLPERMMQSDNAYELRRILETQQVPEPLIEQLILAVFYQISPKGSAEHLAGKDAIDPTRVRAPKCSLAFQRYRIADVISNLRVGIEQRRLTVEEKQAIARLLASDNKQTCEYETWAAVAETLGHPATWLKGIGEPAPDGEGNVTNRPPHIDILHRISQLDDNTLRVTLLNWWDSHTTEDKESFIRVLSNTVNIETVADDPAYKAALQLLDGLDDTQLNKLDAMNLESGRAAYSENTLNKLADWMLTHEGDVTDAREQVFHIARDWRPPQEPVGAPLGNPPVDRSLKIAARWLDAIEQRYGKPISVQVEHTRKAFTSVETRMKNQKEWQDSSRCKARQALREQLAKQGGSISENSLMRREAITRQNGECLYCGASIDITTCQMDHIVPRKGSGCTNTKDNLVAVCPTCNQEKSNMPFPAYCATESARMRGVSMKDAIHRVHHLNLDDQGYKSKAQKALKDGIIRRLKQTEADDPIDGRSLESTSWMAVELYKRLTWRYAHNGGTPVTVNVYRGELTAEARSIMRHAAGMDFHMIGGHGKTRLDRRHHAIDASVIAMMTPAAAQAIAARISMHEAETLTGMRTDWRTYPANPTAKYQHWLESMRRLMNLLNTALDDDRIRVLRNQRYRLGSSAAHKDTITPLTYRELGDPLDASLIRHASTPALYTALTHLPDYNDADGLPANPERRINVNGTIIDSDDTIAFFTGDAAQILVNDGGAAVGSSIHHARVYRYYTLLKSGKRKYAYGWIRVYQQDLIHAHGDLFTEPLTACTLSLRYADQTLVSAIRDGRAEYLGHLLAGDEIVVDFTDGKGAVGKFNEFFAKDIREQPSAMRRWTVTGFPTLVQTSLRPCYLSGEGLAKLEERGGEPVPKEVEKILAGSGGYTPSVNTVFSLHPAIIHRNVFGEERWGTVSGLPTSWRVNDTQK

SEQ ID NO: 699 - protein, 1151 aa, synthetic construct
MQIDAHQSCDMQNDKPYVIGFDLGDFSVGMSAIQIDSEGLPTRILNSQSVIHDSGIDPSQRKYGTSRKKEAGIARRIRRMRRYRKHRLNKLSQILSTNGYKRMNIRQFHGPDIWLIRASAADQYIADEDARRTAIRVSCEHIARHRGWRNPYQNPRVLLHAQPDSATYEQLRENAADHMGGVMPADNETPAQIVRDVLDYHRGEPAIRLRHTGKVTRKTKKNQHTPCAWVLPERMMQSDNAYELRRILETQQVPEPLIEQLILAVFYQISPKGSAEHLAGKDAIDPTRVRAPKCSLAFQRYRIADVISNLRVGIEQRRLTVEEKQAIARLLASDNKQTCEYETWAAVAETLGHPATWLKGIGEPAPDGEGNVTNRPPHIDILHRISQLDDNTLRVTLLNWWDSHTTEDKESFIRVLSNTVNIETVADDPAYKAALQLLDGLDDTQLNKLDAMNLESGRAAYSENTLNKLADWMLTHEGDVTDAREQVFHIARDWRPPQEPVGAPLGNPPVDRSLKIAARWLDAIEQRYGKPISVQVEHTRKAFTSVETRMKNQKEWQDSSRCKARQALREQLAKQGGSISENSLMRREAITRQNGECLYCGASIDITTCQMDAIVPRKGSGCTNTKDNLVAVCPTCNQEKSNMPFPAYCATESARMRGVSMKDAIHRVHHLNLDDQGYKSKAQKALKDGIIRRLKQTEADDPIDGRSLESTSWMAVELYKRLTWRYAHNGGTPVTVNVYRGELTAEARSIMRHAAGMDFHMIGGHGKTRLDRRHHAIDASVIAMMTPAAAQAIAARISMHEAETLTGMRTDWRTYPANPTAKYQHWLESMRRLMNLLNTALDDDRIRVLRNQRYRLGSSAAHKDTITPLTYRELGDPLDASLIRHASTPALYTALTHLPDYNDADGLPANPERRINVNGTIIDSDDTIAFFTGDAAQILVNDGGAAVGSSIHHARVYRYYTLLKSGKRKYAYGWIRVYQQDLIHAHGDLFTEPLTACTLSLRYADQTLVSAIRDGRAEYLGHLLAGDEIVVDFTDGKGAVGKFNEFFAKDIREQPSAMRRWTVTGFPTLVQTSLRPCYLSGEGLAKLEERGGEPVPKEVEKILAGSGGYTPSVNTVFSLHPAIIHRNVFGEERWGTVSGLPTSWRVNDTQK

SEQ ID NO: 700 - protein, 9 aa, synthetic construct
LAGLIDADG

SEQ ID NO: 701 - protein, 1388 aa, Streptococcus thermophilus
MTKPYSIGLDIGTNSVGWAVTTDNYKVPSKKMKVLGNTSKKYIKKNLLGVLLFDSGITAEGRRLKRTARRRYTRRRNRILYLQEIFSTEMATLDDAFFQRLDDSFLVPDDKRDSKYPIFGNLVEEKAYHDEFPTIYHLRKYLADSTKKADLRLVYLALAHMIKYRGHFLIEGEFNSKNNDIQKNFQDFLDTYNAIFESDLSLENSKQLEEIVKDKISKLEKKDRILKLFPGEKNSGIFSEFLKLIVGNQADFRKCFNLDEKASLHFSKESYDEDLETLLGYIGDDYSDVFLKAKKLYDAILLSGFLTVTDNETEAPLSSAMIKRYNEHKEDLALLKEYIRNISLKTYNEVFKDDTKNGYAGYIDGKTNQEDFYVYLKKLLAEFEGADYFLEKIDREDFLRKQRTFDNGSIPYQIHLQEMRAILDKQAKFYPFLAKNKERIEKILTFRIPYYVGPLARGNSDFAWSIRKRNEKITPWNFEDVIDKESSAEAFINRMTSFDLYLPEEKVLPKHSLLYETFNVYNELTKVRFIAESMRDYQFLDSKQKKDIVRLYFKDKRKVTDKDIIEYLHAIYGYDGIELKGIEKQFNSSLSTYHDLLNIINDKEFLDDSSNEAIIEEIIHTLTIFEDREMIKQRLSKFENIFDKSVLKKLSRRHYTGWGKLSAKLINGIRDEKSGNTILDYLIDDGISNRNFMQLIHDDALSFKKKIQKAQIIGDEDKGNIKEVVKSLPGSPAIKKGILQSIKIVDELVKVMGGRKPESIVVEMARENQYTNQGKSNSQQRLKRLEKSLKELGSKILKENIPAKLSKIDNNALQNDRLYLYYLQNGKDMYTGDDLDIDRLSNYDIDHIIPQAFLKDNSIDNKVLVSSASNRGKSDDVPSLEVVKKRKTFWYQLLKSKLISQRKFDNLTKAERGGLSPEDKAGFIQRQLVETRQITKHVARLLDEKFNNKKDENNRAVRTVKIITLKSTLVSQFRKDFELYKVREINDFHHAHDAYLNAVVASALLKKYPKLEPEFVYGDYPKYNSFRERKSATEKVYFYSNIMNIFKKSISLADGRVIERPLIEVNEETGESVWNKESDLATVRRVLSYPQVNVVKKVEEQNHGLDRGKPKGLFNANLSSKPKPNSNENLVGAKEYLDPKKYGGYAGISNSFTVLVKGTIEKGAKKKITNVLEFQGISILDRINYRKDKLNFLLEKGYKDIELIIELPKYSLFELSDGSRRMLASILSTNNKRGEIHKGNQIFLSQKFVKLLYHAKRISNTINENHRKYVENHKKEFEELFYYILEFNENYVGAKKNGKLLNSAFQSWQNHSIDELCSSFIGPTGSERKGLFELTSRGSAADFEFLGVKIPRYRDYTPSSLLKDATLIHQSVTGLYETRIDLAKLGEG

SEQ ID NO: 702 - protein, 1368 aa, Streptococcus sp. [sequence omitted]

SEQ ID NO: 703 - protein, 1300 aa, Francisella sp.
  source 1..1300: note = Francisella novicida
MSIYQEFVNKYSLSKTLRFELIPQGKTLENIKARGLILDDEKRAKDYKKAKQIIDKYHQFFIEEILSSVCISEDLLQNYSDVYFKLKKSDDDNLQKDFKSAKDTIKKQISEYIKDSEKFKNLFNQNLIDAKKGQESDLILWLKQSKDNGIELFKANSDITDIDEALEIIKSFKGWTTYFKGFHENRKNVYSSNDIPTSIIYRIVDDNLPKFLENKAKYESLKDKAPEAINYEQIKKDLAEELTFDIDYKTSEVNQRVFSLDEVFEIANFNNYLNQSGITKFNTIIGGKFVNGENTKRKGINEYINLYSQQINDKTLKKYKMSVLFKQILSDTESKSFVIDKLEDDSDVVTTMQSFYEQIAAFKTVEEKSIKETLSLLFDDLKAQKLDLSKIYFKNDKSLTDLSQQVFDDYSVIGTAVLEYITQQIAPKNLDNPSKKEQELIAKKTEKAKYLSLETIKLALEEFNKHRDIDKQCRFEEILANFAAIPMIFDEIAQNKDNLAQISIKYQNQGKKDLLQASAEDDVKAIKDLLDQTNNLLHKLKIFHISQSEDKANILDKDEHFYLVFEECYFELANIVPLYNKIRNYITQKPYSDEKFKLNFENSTLANGWDKNKEPDNTAILFIKDDKYYLGVMNKKNNKIFDDKAIKENKGEGYKKIVYKLLPGANKMLPKVFFSAKSIKFYNPSEDILRIRNHSTHTKNGSPQKGYEKFEFNIEDCRKFIDFYKQSISKHPEWKDFGFRFSDTQRYNSIDEFYREVENQGYKLTFENISESYIDSVVNQGKLYLFQIYNKDFSAYSKGRPNLHTLYWKALFDERNLQDVVYKLNGEAELFYRKQSIPKKITHPAKEAIANKNKDNPKKESVFEYDLIKDKRFTEDKFFFHCPITINFKSSGANKFNDEINLLLKEKANDVHILSIDRGERHLAYYTLVDGKGNIIKQDTFNIIGNDRMKTNYHDKLAAIEKDRDSARKDWKKINNIKEMKEGYLSQVVHEIAKLVIEYNAIVVFEDLNFGFKRGRFKVEKQVYQKLEKMLIEKLNYLVFKDNEFDKTGGVLRAYQLTAPFETFKKMGKQTGIIYYVPAGFTSKICPVTGFVNQLYPKYESVSKSQEFFSKFDKICYNLDKGYFEFSFDYKNFGDKAAKGKWTIASFGSRLINFRNSDKNHNWDTREVYPTKELEKLLKDYSIEYGHGECIKAAICGESDKKFFAKLTSVLNTILQMRNSKTGTELDYLISPVADVNGNFFDSRQAPKNMPQDADANGAYHIGLKGLMLLGRIKNNQEGKKLNLVIKNEEYFEFVQNRNN

SEQ ID NO: 704 - protein, 16 aa, synthetic construct
SGSETPGTSESATPES

SEQ ID NO: 705 - protein, 32 aa, synthetic construct
SGGSSGGSSGSETPGTSESATPESSGGSSGGS

SEQ ID NO: 706 - protein, 4 aa, synthetic construct
SGGS

SEQ ID NO: 707 - protein, 7 aa, synthetic construct
PAPAPAP

SEQ ID NO: 708 - protein, 10 aa, synthetic construct
EAAAKEAAAK

SEQ ID NO: 709 - protein, 24 aa, synthetic construct
SGGSSGGSSGSETPGTSESATPES

SEQ ID NO: 710 - protein, 24 aa, synthetic construct
SGSETPGTSESATPESSGGSSGGS

SEQ ID NO: 711 - protein, 16 aa, synthetic construct
SGGSSGGSSGGSSGGS

SEQ ID NO: 712 - protein, 18 aa, synthetic construct
KESGSVSSEQLAQFRSLD

SEQ ID NO: 713 - protein, 16 aa, synthetic construct
KRRPGPGPGVPPKRAR

SEQ ID NO: 714 - protein, 29 aa, synthetic construct
GGGPGRKRPLEEGSNGHSKYRLKKRRKTP

SEQ ID NO: 715 - protein, 27 aa, synthetic construct
TAVLRVKRKRSAEPAEALVLACKRLRS

SEQ ID NO: 716 - protein, 22 aa, synthetic construct
SSDDEATADSQHAAPPKKKRKV

SEQ ID NO: 717 - protein, 22 aa, synthetic construct
EGADKRTADGSEFESPKKKRKV

SEQ ID NO: 718 - protein, 9 aa, synthetic construct
PAAKRVKLD

SEQ ID NO: 719 - protein, 8 aa, synthetic construct
GSSGGSSG

SEQ ID NO: 720 - protein, 167 aa, synthetic construct
SNPEFTHEYWMRHALTLARRARDEGEVPVGAVLVLNNQVIGEGWNRAIGLHDPTAHAEIMALRQGGLVLQNYRLIDTTLYSTFEPCVMCSGAMVHSRIGTLVFGVRNSLRGAAGSLMNVLNYPGMNHQVKTIGGVLAPECSGLLCDFYRMPREVWNQQKDELKSIND

SEQ ID NO: 721 - protein, 167 aa, synthetic construct
SNPEFTHEYWMRHALTLARRARDEGEVPVGAVLVLNNQVIGEGWNRAIGLHDPTAHAEIMALRQGGLVLQNYRLADTTLYSTFEPCVMCSGAMVHSRIGTLVFGVRNSKRGAAGSLLNVLAYPGMNHQVKTIGGVLAPECSGLLADFYRMPRQVWNQQKDELKSIND

SEQ ID NO: 722 - protein, 167 aa, synthetic construct
SNPEFTHEYWMRHALTLARRARDEGEVPVGAVLVLNNQVIGEGWNRAIGLHDPTAHAEIMALRQGGLVLQNYRLQDTTLYSTFEPCVMCSGAMVHSRIGTLVFGVRNSKRGAAGSLINVLNYPGMNHQVKTIGGVLAPECSGLLQDFYRMPRQVWNQQKDELKSIND

SEQ ID NO: 723 - protein, 167 aa, synthetic construct
SNPEFTHEYWMRHALTLARRACDEGEVPVGAVLVLNNQVIGEGWNRAIGLHDPTAHAEIMALRQGGLALQNYRLYGTTLYSTFEPCVMCSGAMVHSRIGTLVFGVRNHKRGAAGSLLNVLNHPGMAHQVKTIGGVLAYLCSALLADFYRMPRRVWRQQKDEHKSIND

SEQ ID NO: 724 - protein, 1307 aa, synthetic construct
  source 1..1307: note = LPG20126
MAPKKKRKVDYKDDDDKSNPEFTHEYWMRHALTLARRARDEGEVPVGAVLVLNNQVIGEGWNRAIGLHDPTAHAEIMALRQGGLVLQNYRLIDTTLYSTFEPCVMCSGAMVHSRIGTLVFGVRNSLRGAAGSLMNVLNYPGMNHQVKTIGGVLAPECSGLLCDFYRMPREVWNQQKDELKSINDSGGSSGGSSGSETPGTSESATPESSGGSSGGSMRELDYRIGLAIGTNSIGWGVIELSWNKDRERYEKVRIVDQGVRMFDRAEMPKTGASLAEPRRIARSSRRRLNRKSQRKKNIRNLLVQHGVITQEELDSLYPLSKKSMDIWGIRLDGLDRLLNHFEWARLLIHLAQRRGFKSNRKSELKDTETGKVLSSIQLNEKRLSLYRTVGEMWMKDPDFSKYDRKRNSPNEYVFSVSRAELEKEIVTLFAAQRRFQSPYASKDLQETYLQIWTHQLPFASGNAILNKVGYCSLLKGKERRIPKATYTFQYFSALDQVNRTRLGPDFQPFTKEQREIILNNMFQRTDYYKKKTIPEVTYYDIRKWLELDETIQFKGLNYDPNEELKKIEKKPFINLKAFYEINKVVANYSERTNETFSTLDYDGIGYALTVYKTDKDIRSYLKSSHNLPKRCYDDQLIEELLSLSYTKFGHLSLKAINHVLSIMQKGNTYKEAVDQLGYDTSGLKKEKRSKFLPPISDEITNPIVKRALTQARKVVNAIIRRHGSPHSVHIELARELSKNHDERTKIVSAQDENYKKNKGAISILSEHGILNPTGYDIVRYKLWKEQGERCAYSLKEIPADTFFNELKKERNGAPILEVDHILPYSQSFIDSYHNKVLVYSDENRKKGNRIPYTYFLETNKDWEAFERYVRSNKFFSKKKREYLLKRAYLPRESELIKERHLNDTRYASTFLKNFIEQNLQFKEAEDNPRKRRVQTVNGVITAHFRKRWGLEKDRQETYLHHAMDAIIVACTDHHMVTRVTEYYQIKESNKSVKKPYFPMPWEGFRDELLSHLASQPIAKKISEELKAGYQSLDYIFVSRMPKRSITGAAHKQTIMRKGGIDKKGKTIIIERLHLKDIKFDENGDFKMVGKEQDMATYEAIKQRYLEHGKNSKKAFETPLYKPSKKGTGNLIKRVKVEGQAKSFVREVNGGVAQNGDLVRVDLFEKDDKYYMVPIYVPDTVCSELPKKVVASSKGYEQWLTLDNSFTFKFSLYPYDLVRLVKGDEDRFLYFGTLDIDSDRLNFKDVNKPSKKNEYRYSLKTIEDLEKYEVGVLGDLRLVRKETRRNFHSGGSKRPAATKKAGQAKKKK

SEQ ID NO: 725 - protein, 1307 aa, synthetic construct
  source 1..1307: note = LPG20127
MAPKKKRKVDYKDDDDKSNPEFTHEYWMRHALTLARRARDEGEVPVGAVLVLNNQVIGEGWNRAIGLHDPTAHAEIMALRQGGLVLQNYRLADTTLYSTFEPCVMCSGAMVHSRIGTLVFGVRNSKRGAAGSLLNVLAYPGMNHQVKTIGGVLAPECSGLLADFYRMPRQVWNQQKDELKSINDSGGSSGGSSGSETPGTSESATPESSGGSSGGSMRELDYRIGLAIGTNSIGWGVIELSWNKDRERYEKVRIVDQGVRMFDRAEMPKTGASLAEPRRIARSSRRRLNRKSQRKKNIRNLLVQHGVITQEELDSLYPLSKKSMDIWGIRLDGLDRLLNHFEWARLLIHLAQRRGFKSNRKSELKDTETGKVLSSIQLNEKRLSLYRTVGEMWMKDPDFSKYDRKRNSPNEYVFSVSRAELEKEIVTLFAAQRRFQSPYASKDLQETYLQIWTHQLPFASGNAILNKVGYCSLLKGKERRIPKATYTFQYFSALDQVNRTRLGPDFQPFTKEQREIILNNMFQRTDYYKKKTIPEVTYYDIRKWLELDETIQFKGLNYDPNEELKKIEKKPFINLKAFYEINKVVANYSERTNETFSTLDYDGIGYALTVYKTDKDIRSYLKSSHNLPKRCYDDQLIEELLSLSYTKFGHLSLKAINHVLSIMQKGNTYKEAVDQLGYDTSGLKKEKRSKFLPPISDEITNPIVKRALTQARKVVNAIIRRHGSPHSVHIELARELSKNHDERTKIVSAQDENYKKNKGAISILSEHGILNPTGYDIVRYKLWKEQGERCAYSLKEIPADTFFNELKKERNGAPILEVDHILPYSQSFIDSYHNKVLVYSDENRKKGNRIPYTYFLETNKDWEAFERYVRSNKFFSKKKREYLLKRAYLPRESELIKERHLNDTRYASTFLKNFIEQNLQFKEAEDNPRKRRVQTVNGVITAHFRKRWGLEKDRQETYLHHAMDAIIVACTDHHMVTRVTEYYQIKESNKSVKKPYFPMPWEGFRDELLSHLASQPIAKKISEELKAGYQSLDYIFVSRMPKRSITGAAHKQTIMRKGGIDKKGKTIIIERLHLKDIKFDENGDFKMVGKEQDMATYEAIKQRYLEHGKNSKKAFETPLYKPSKKGTGNLIKRVKVEGQAKSFVREVNGGVAQNGDLVRVDLFEKDDKYYMVPIYVPDTVCSELPKKVVASSKGYEQWLTLDNSFTFKFSLYPYDLVRLVKGDEDRFLYFGTLDIDSDRLNFKDVNKPSKKNEYRYSLKTIEDLEKYEVGVLGDLRLVRKETRRNFHSGGSKRPAATKKAGQAKKKK

SEQ ID NO: 726 - protein, 1307 aa, synthetic construct
  source 1..1307: note = LPG20128
MAPKKKRKVDYKDDDDKSNPEFTHEYWMRHALTLARRARDEGEVPVGAVLVLNNQVIGEGWNRAIGLHDPTAHAEIMALRQGGLVLQNYRLQDTTLYSTFEPCVMCSGAMVHSRIGTLVFGVRNSKRGAAGSLINVLNYPGMNHQVKTIGGVLAPECSGLLQDFYRMPRQVWNQQKDELKSINDSGGSSGGSSGSETPGTSESATPESSGGSSGGSMRELDYRIGLAIGTNSIGWGVIELSWNKDRERYEKVRIVDQGVRMFDRAEMPKTGASLAEPRRIARSSRRRLNRKSQRKKNIRNLLVQHGVITQEELDSLYPLSKKSMDIWGIRLDGLDRLLNHFEWARLLIHLAQRRGFKSNRKSELKDTETGKVLSSIQLNEKRLSLYRTVGEMWMKDPDFSKYDRKRNSPNEYVFSVSRAELEKEIVTLFAAQRRFQSPYASKDLQETYLQIWTHQLPFASGNAILNKVGYCSLLKGKERRIPKATYTFQYFSALDQVNRTRLGPDFQPFTKEQREIILNNMFQRTDYYKKKTIPEVTYYDIRKWLELDETIQFKGLNYDPNEELKKIEKKPFINLKAFYEINKVVANYSERTNETFSTLDYDGIGYALTVYKTDKDIRSYLKSSHNLPKRCYDDQLIEELLSLSYTKFGHLSLKAINHVLSIMQKGNTYKEAVDQLGYDTSGLKKEKRSKFLPPISDEITNPIVKRALTQARKVVNAIIRRHGSPHSVHIELARELSKNHDERTKIVSAQDENYKKNKGAISILSEHGILNPTGYDIVRYKLWKEQGERCAYSLKEIPADTFFNELKKERNGAPILEVDHILPYSQSFIDSYHNKVLVYSDENRKKGNRIPYTYFLETNKDWEAFERYVRSNKFFSKKKREYLLKRAYLPRESELIKERHLNDTRYASTFLKNFIEQNLQFKEAEDNPRKRRVQTVNGVITAHFRKRWGLEKDRQETYLHHAMDAIIVACTDHHMVTRVTEYYQIKESNKSVKKPYFPMPWEGFRDELLSHLASQPIAKKISEELKAGYQSLDYIFVSRMPKRSITGAAHKQTIMRKGGIDKKGKTIIIERLHLKDIKFDENGDFKMVGKEQDMATYEAIKQRYLEHGKNSKKAFETPLYKPSKKGTGNLIKRVKVEGQAKSFVREVNGGVAQNGDLVRVDLFEKDDKYYMVPIYVPDTVCSELPKKVVASSKGYEQWLTLDNSFTFKFSLYPYDLVRLVKGDEDRFLYFGTLDIDSDRLNFKDVNKPSKKNEYRYSLKTIEDLEKYEVGVLGDLRLVRKETRRNFHSGGSKRPAATKKAGQAKKKK

SEQ ID NO: 727 - protein, 1299 aa, synthetic construct
  source 1..1299: note = LPG20125
MAPKKKRKVSNPEFTHEYWMRHALTLARRACDEGEVPVGAVLVLNNQVIGEGWNRAIGLHDPTAHAEIMALRQGGLALQNYRLYGTTLYSTFEPCVMCSGAMVHSRIGTLVFGVRNHKRGAAGSLLNVLNHPGMAHQVKTIGGVLAYLCSALLADFYRMPRRVWRQQKDEHKSINDSGGSSGGSSGSETPGTSESATPESSGGSSGGSMRELDYRIGLAIGTNSIGWGVIELSWNKDRERYEKVRIVDQGVRMFDRAEMPKTGASLAEPRRIARSSRRRLNRKSQRKKNIRNLLVQHGVITQEELDSLYPLSKKSMDIWGIRLDGLDRLLNHFEWARLLIHLAQRRGFKSNRKSELKDTETGKVLSSIQLNEKRLSLYRTVGEMWMKDPDFSKYDRKRNSPNEYVFSVSRAELEKEIVTLFAAQRRFQSPYASKDLQETYLQIWTHQLPFASGNAILNKVGYCSLLKGKERRIPKATYTFQYFSALDQVNRTRLGPDFQPFTKEQREIILNNMFQRTDYYKKKTIPEVTYYDIRKWLELDETIQFKGLNYDPNEELKKIEKKPFINLKAFYEINKVVANYSERTNETFSTLDYDGIGYALTVYKTDKDIRSYLKSSHNLPKRCYDDQLIEELLSLSYTKFGHLSLKAINHVLSIMQKGNTYKEAVDQLGYDTSGLKKEKRSKFLPPISDEITNPIVKRALTQARKVVNAIIRRHGSPHSVHIELARELSKNHDERTKIVSAQDENYKKNKGAISILSEHGILNPTGYDIVRYKLWKEQGERCAYSLKEIPADTFFNELKKERNGAPILEVDHILPYSQSFIDSYHNKVLVYSDENRKKGNRIPYTYFLETNKDWEAFERYVRSNKFFSKKKREYLLKRAYLPRESELIKERHLNDTRYASTFLKNFIEQNLQFKEAEDNPRKRRVQTVNGVITAHFRKRWGLEKDRQETYLHHAMDAIIVACTDHHMVTRVTEYYQIKESNKSVKKPYFPMPWEGFRDELLSHLASQPIAKKISEELKAGYQSLDYIFVSRMPKRSITGAAHKQTIMRKGGIDKKGKTIIIERLHLKDIKFDENGDFKMVGKEQDMATYEAIKQRYLEHGKNSKKAFETPLYKPSKKGTGNLIKRVKVEGQAKSFVREVNGGVAQNGDLVRVDLFEKDDKYYMVPIYVPDTVCSELPKKVVASSKGYEQWLTLDNSFTFKFSLYPYDLVRLVKGDEDRFLYFGTLDIDSDRLNFKDVNKPSKKNEYRYSLKTIEDLEKYEVGVLGDLRLVRKETRRNFHSGGSKRPAATKKAGQAKKKK

SEQ ID NO: 728 - DNA, 24 bp, synthetic construct
  source 1..24: mol_type = other DNA
ggcagctctggcggaagttccgga

SEQ ID NO: 729 - protein, 1307 aa, synthetic construct
  source 1..1307: note = LPG20129
MAPKKKRKVDYKDDDDKSNPEFTHEYWMRHALTLARRARDEGEVPVGAVLVLNNQVIGEGWNRAIGLHDPTAHAEIMALRQGGLVLQNYRLYDTTLYSTFEPCVMCSGAMVHSRIGTLVFGVRNSKRGAAGSLLNVLGYPGMNHQVKTIGGVLAPECSGLLLDFYRMPRQVWNQQKDELKSINDSGGSSGGSSGSETPGTSESATPESSGGSSGGSMRELDYRIGLAIGTNSIGWGVIELSWNKDRERYEKVRIVDQGVRMFDRAEMPKTGASLAEPRRIARSSRRRLNRKSQRKKNIRNLLVQHGVITQEELDSLYPLSKKSMDIWGIRLDGLDRLLNHFEWARLLIHLAQRRGFKSNRKSELKDTETGKVLSSIQLNEKRLSLYRTVGEMWMKDPDFSKYDRKRNSPNEYVFSVSRAELEKEIVTLFAAQRRFQSPYASKDLQETYLQIWTHQLPFASGNAILNKVGYCSLLKGKERRIPKATYTFQYFSALDQVNRTRLGPDFQPFTKEQREIILNNMFQRTDYYKKKTIPEVTYYDIRKWLELDETIQFKGLNYDPNEELKKIEKKPFINLKAFYEINKVVANYSERTNETFSTLDYDGIGYALTVYKTDKDIRSYLKSSHNLPKRCYDDQLIEELLSLSYTKFGHLSLKAINHVLSIMQKGNTYKEAVDQLGYDTSGLKKEKRSKFLPPISDEITNPIVKRALTQARKVVNAIIRRHGSPHSVHIELARELSKNHDERTKIVSAQDENYKKNKGAISILSEHGILNPTGYDIVRYKLWKEQGERCAYSLKEIPADTFFNELKKERNGAPILEVDHILPYSQSFIDSYHNKVLVYSDENRKKGNRIPYTYFLETNKDWEAFERYVRSNKFFSKKKREYLLKRAYLPRESELIKERHLNDTRYASTFLKNFIEQNLQFKEAEDNPRKRRVQTVNGVITAHFRKRWGLEKDRQETYLHHAMDAIIVACTDHHMVTRVTEYYQIKESNKSVKKPYFPMPWEGFRDELLSHLASQPIAKKISEELKAGYQSLDYIFVSRMPKRSITGAAHKQTIMRKGGIDKKGKTIIIERLHLKDIKFDENGDFKMVGKEQDMATYEAIKQRYLEHGKNSKKAFETPLYKPSKKGTGNLIKRVKVEGQAKSFVREVNGGVAQNGDLVRVDLFEKDDKYYMVPIYVPDTVCSELPKKVVASSKGYEQWLTLDNSFTFKFSLYPYDLVRLVKGDEDRFLYFGTLDIDSDRLNFKDVNKPSKKNEYRYSLKTIEDLEKYEVGVLGDLRLVRKETRRNFHSGGSKRPAATKKAGQAKKKK

SEQ ID NO: 730 - RNA, 117 nt, synthetic construct
  source 1..117: mol_type = other RNA
ttgtcccacagatatccagaaccgtcatagttccattaaaaagttgatgtttctatgataagggtttcgacccgtggcgtcggggatcgcctgcccttgaaagggcttctccccatt